(19) United States
(12) Patent Application Publication
(10) Pub. No.: US 2011/0184375 A1
(43) Pub. Date: Jul. 28, 2011

(54) MARKER SEQUENCE FOR NEURODEGENERATIVE DISEASES AND THE USE THEREOF

(75) Inventors: Heike Göhler, Bochum (DE); Helmut E. Meyer, Recklinghausen (DE); Katrin Marcus, Remscheid (DE); Axel Kowald, Bochum (DE); Florian Tribl, Vienna (AT); Manfred Gerlach, Hammelburg (DE); Peter Riederer, Wurzburg (DE); Angelika Lüking, Bochum (DE); Christian Scheer, Dortmund (DE); Jens Beator, Kreiensen (DE)

(73) Assignee: Protagen Aktiengesellschaft, Dortmund (DE)

(21) Appl. No.: 12/809,831

(22) PCT Filed: Dec. 22, 2008
(86) PCT No.: PCT/DE2008/002144

§ 371 Date: Feb. 7, 2011

(30) Foreign Application Priority Data
Dec. 21, 2007 (DE) 10 2007 062 847.3

(51) Int. Cl. A61M 1/36; C40B 30/00; C40B 40/08; C40B 40/10; C07H 21/00; C07K 14/00; C40B 30/04

(52) U.S. Cl. 604/500; 506/7; 506/17; 506/18; 536/23.1; 530/350; 506/9

(57) ABSTRACT

The present invention relates to new marker sequences for neurodegenerative diseases and the diagnostic use thereof together with a method for screening of potential active substances for neurodegenerative diseases by means of these marker sequences. Furthermore, the invention relates to a diagnostic device containing such marker sequences for neurodegenerative diseases, in particular a protein biochip and the use thereof.

[0001] The present invention relates to new marker sequences for neurodegenerative diseases and the diagnostic use thereof together with a method for screening potential active substances for neurodegenerative diseases by means of these marker sequences. Furthermore, the invention relates to a diagnostic device containing marker sequences of this type for neurodegenerative diseases, in particular a protein biochip and the use thereof.

[0002] Protein biochips are gaining increasing industrial importance in analysis and diagnosis as well as in pharmaceutical development. Protein biochips have become established as screening instruments.

[0003] The rapid and highly parallel detection of a multiplicity of specifically binding analysis molecules in a single experiment is rendered possible hereby. To produce protein biochips, it is necessary to have the required proteins available. For this purpose, in particular protein expression libraries have become established. The high throughput cloning of defined open reading frames is one possibility (Heyman, J. A., Cornthwaite, J., Foncerrada, L., Gilmore, J. R., Gontang, E., Hartman, K. J., Hernandez, C. L., Hood, R., Hull, H. M., Lee, W. Y., Marcil, R., Marsh, E. J., Mudd, K. M., Patino, M. J., Purcell, T. J., Rowland, J. J., Sindici, M. L. and Hoeffler, J. P., (1999) Genome-scale cloning and expression of individual open reading frames using topoisomerase I-mediated ligation. Genome Res, 9, 383-392; Kersten, B., Feilner, T., Kramer, A., Wehrmeyer, S., Possling, A., Witt, I., Zanor, M. I., Stracke, R., Lueking, A., Kreutzberger, J., Lehrach, H. and Cahill, D. J. (2003) Generation of Arabidopsis protein chip for antibody and serum screening. Plant Molecular Biology, 52, 999-1010; Reboul, J., Reboul, J., Vaglio, P., Rual, J. F., Lamesch, P., Martinez, M., Armstrong, CM., Li, S., Jacotot, L., Bertin, N., Janky, R., Moore, T., Hudson, J. R., Jr., Hartley, J. L., Brasch, M. A., Vandenhaute, J., Boulton, S., Endress, G. A., Jenna, S., Chevet, E., Papasotiropoulos, V., Tolias, P. P., Ptacek, J., Snyder, M., Huang, R., Chance, M. R., Lee, H., Doucette-Stamm, L., Hill, D. E. and Vidal, M. (2003) C. elegans ORFeome Version 1.1: experimental verification of the genome annotation and resource for proteome-scale protein expression. Nat Genet, 34, 35-41.; Walhout, A. J., Temple, G. F., Brasch, M. A., Hartley, J. L., Lorson, M. A., van den Heuvel, S, and Vidal, M. (2000) GATEWAY recombinational cloning: application to the cloning of large numbers of open reading frames or ORFeomes. Methods Enzymol, 328, 575-592). However, an approach of this type is strongly connected to the progress of the genome sequencing projects and the annotation of these gene sequences. Furthermore, the determination of the expressed sequence can be ambiguous due to differential splicing processes. This problem may be circumvented by the application of cDNA expression libraries (Büssow, K., Cahill, D., Nietfeld, W., Bancroft, D., Scherzinger, E., Lehrach, H. and Walter, G. (1998) A method for global protein expression and antibody screening on high-density filters of an arrayed cDNA library. Nucleic Acids Research, 26, 5007-5008; Büssow, K., Nordhoff, E., Lübbert, C, Lehrach, H. and Walter, G. (2000) A human cDNA library for high-throughput protein expression screening. Genomics, 65, 1-8; Holz, C, Lueking, A., Bovekamp, L., Gutjahr, C, Bolotina, N., Lehrach, H. and Cahill, D. J. (2001) A human cDNA expression library in yeast enriched for open reading frames. Genome Res, 11, 1730-1735; Lueking, A., Holz, C, Gotthold, C, Lehrach, H. and Cahill, D. (2000) A system for dual protein expression in Pichia pastoris and Escherichia coli, Protein Expr. Purif., 20, 372-378). The cDNA of a particular tissue is hereby cloned into a bacterial or an eukaryotic expression vector, such as, e.g., yeast. The vectors used for the expression are generally characterized in that they carry inducible promoters that may be used to control the time of protein expression. Furthermore, expression vectors have sequences for so-called affinity epitopes or affinity proteins, which on the one hand permit the specific detection of the recombinant fusion proteins by means of an antibody directed against the affinity epitope, and on the other hand the specific purification via affinity chromatography (IMAC) is rendered possible.

[0004] For example, the gene products of a cDNA expression library from human fetal brain tissue in the bacterial expression system Escherichia coli were arranged in high-density format on a membrane and could be successfully screened with different antibodies. It was possible to show that the proportion of full-length proteins is at least 66%. Additionally, the recombinant proteins from the library could be expressed and purified in a high-throughput manner (Braun P., Hu, Y., Shen, B., Halleck, A., Koundinya, M., Harlow, E. and LaBaer, J. (2002) Proteome-scale purification of human proteins from bacteria. Proc Natl Acad Sci USA, 99, 2654-2659; Büssow (2000) supra; Lueking, A., Horn, M., Eickhoff, H., Bussow, K., Lehrach, H. and Walter, G. (1999) Protein microarrays for gene expression and antibody screening. Analytical Biochemistry, 270, 103-111). Protein biochips of this type based on cDNA expression libraries are in particular the subject matter of WO 99/57311 and WO 99/57312.

[0005] Furthermore, in addition to antigen-presenting protein biochips, antibody-presenting arrangements are likewise described (Lal et al (2002) Antibody arrays: An embryonic but rapidly growing technology, DDT, 7, 143-149; Kusnezow et al. (2003), Antibody microarrays: An evaluation of production parameters, Proteomics, 3, 254-264).

[0006] However, there is a great need to provide indication-specific diagnostic devices, such as a protein biochip.

[0007] Marker sequences and the diagnostic use thereof for neurodegenerative diseases, in particular in the embodiment of a protein biochip, as well as tests in this regard for the screening of active substances have not been described in the prior art.

[0008] The object of the present invention is therefore to provide marker sequences and their diagnostic use.

[0009] The provision of specific marker sequences permits a reliable diagnosis and stratification of patients with neurodegenerative diseases, in particular by means of a protein biochip.

[0010] The invention therefore relates to the use of marker sequences for the diagnosis of neurodegenerative diseases, wherein at least one marker sequence of a cDNA selected from the group SEQ 1-927 or respectively a protein coding therefor or respectively a partial sequence or fragment thereof (hereinafter: marker sequences according to the invention) is determined on or from a patient to be examined.

[0011] It was possible to identify the marker sequences according to the invention by means of differential screening of samples from healthy test subjects with patient samples with neurodegenerative diseases.

[0012] The term “neurodegenerative diseases” encompasses a group of in most cases slowly progressing, congenital or sporadically occurring diseases of the nervous system. The main feature is the progressive lost of neurons, resulting in several neurologic symptoms, dementia and movements disorders. The diseases may occur in different age resulting in characteristic histological pattern of damage. There are described in particular Morbus Alzheimer, Morbus Parkinson, Amyotrophic lateral sclerosis (ALS), Morbus Huntington ('s Chorea) as well as Morbus Pick (definition e.g., according to Pschyrembel, de Gruyter, 261st edition (2007), Berlin). According to the invention, Morbus Alzheimer, Morbus Parkinson, Morbus Huntington are preferred.

[0013] In a further preferred embodiment of the invention, the invention relates to the diagnosis of neurodegenerative diseases, preferably Morbus Parkinson, wherein at least one marker sequence of a cDNA selected from the group SEQ 1-293 or respectively a protein coding therefor or a partial sequence or fragment thereof is determined on or from a patient to be examined.

[0014] Furthermore, a marker sequence selected from the group SEQ 1-20, 21-40, 41-60, 61-80, 81-100, 101-120, 121-140, 141-160, 161-180, 181-200, 201-220, 221-240, 241-260, 261-280, 281-293 or respectively a protein coding therefor or a partial sequence or fragment thereof is preferred.

[0015] In a further preferred embodiment of the invention, the invention relates to the diagnosis of neurodegenerative diseases, preferably Morbus Alzheimer, wherein at least one marker sequence of a cDNA selected from the group SEQ 294-664 or respectively a protein coding therefor or a partial sequence or fragment thereof is determined on or from a patient to be examined.

[0016] Furthermore, a marker sequence selected from the group SEQ 294-320, 321-340, 341-360, 361-380, 381-400, 401-420, 421-440, 441-460, 461-480, 481-500, 501-520, 521-540, 541-560, 561-580, 581-600, 601-620, 621-640, 641-664 or respectively a protein coding therefor or a partial sequence or fragment thereof is preferred.

[0017] In a further preferred embodiment of the invention, the invention relates to the diagnosis of neurodegenerative diseases, preferably Morbus Huntington, wherein at least one marker sequence of a cDNA selected from the group SEQ 665-927 or respectively a protein coding therefor or a partial sequence or fragment thereof is determined on or from a patient to be examined.

[0018] Furthermore, a marker sequence selected from the group SEQ 665-680, 681-700, 701-720, 721-740, 741-760, 761-780, 781-800, 801-820, 821-840, 841-860, 861-880, 881-900, 901-927 or respectively a protein coding therefor or a partial sequence or fragment thereof is preferred.

[0019] In a further embodiment at least 2 to 5 or 10, preferably 30 to 50 marker sequences or 50 to 100 or more marker sequences are determined on or from a patient to be examined, in particular such respectively from the group SEQ 1-293, 294-664, 665-927.

[0020] In a further embodiment of the invention, the marker sequences according to the invention can likewise be combined, supplemented, fused or expanded likewise with known biomarkers for this indication.

[0021] In a preferred embodiment, the determination of the marker sequences is carried out outside the human body and the determination is carried out in an ex vivo/in vitro diagnosis.

[0022] In a further embodiment of the invention, the invention relates to the use of marker sequences as diagnostic agents, wherein at least one marker sequence of a cDNA is selected from the group SEQ 1-927 in particular such respectively from the group SEQ 1-293, 294-664, 665-927 or respectively a protein coding therefor or respectively a partial sequence or fragment thereof.

[0023] Furthermore, the invention relates to a method for the diagnosis of neurodegenerative diseases, wherein a.) at least one marker sequence of a cDNA selected from the group SEQ 1-927 in particular such respectively from the group SEQ 1-293, 294-664, 665-927 or respectively a protein coding therefor or respectively a partial sequence or fragment thereof is applied to a solid support and b.) is brought into contact with body fluid or tissue extract of a patient and c.) the detection of an interaction of the body fluid or tissue extract with the marker sequences from a.) is carried out.

[0024] The invention therefore likewise relates to diagnostic agents for the diagnosis of neurodegenerative diseases respectively selected from the group SEQ 1-927 in particular such respectively from the group SEQ 1-293, 294-664, 665-927 or respectively a protein coding therefor or respectively a partial sequence or fragment thereof.

[0025] The detection of an interaction of this type can be carried out, for example, by a probe, in particular by an antibody.

[0026] The invention therefore likewise relates to the object of providing a diagnostic device or an assay, in particular a protein biochip, which permits a diagnosis or examination for neurodegenerative diseases.

[0027] Furthermore, the invention relates to a method for the stratification, in particular risk stratification and/or therapy control of a patient with neurodegenerative diseases, wherein at least one marker sequence of a cDNA selected from the group SEQ 1-927 in particular such respectively from the group SEQ 1-293, 294-664, 665-927 or respectively a protein coding therefor is determined on a patient to be examined.

[0028] Furthermore, the stratification of the patients with neurodegenerative diseases in new or established subgroups of neurodegenerative diseases is also covered, as well as the expedient selection of patient groups for the clinical development of new therapeutic agents. The term therapy control likewise covers the allocation of patients to responders and non-responders regarding a therapy or the therapy course thereof.

[0029] “Diagnosis” for the purposes of this invention means the positive determination of neurodegenerative diseases by means of the marker sequences according to the invention as well as the assignment of the patients to neurodegenerative diseases. The term diagnosis covers medical diagnostics and examinations in this regard, in particular in-vitro diagnostics and laboratory diagnostics, likewise proteomics and nucleic acid blotting. Further tests can be necessary to be sure and to exclude other diseases. The term diagnosis therefore likewise covers the differential diagnosis of neurodegenerative diseases by means of the marker sequences according to the invention and the prognosis of neurodegenerative diseases.

[0030] “Stratification or therapy control” for the purposes of this invention means that the method according to the invention renders possible decisions for the treatment and therapy of the patient, whether it is the hospitalization of the patient, the use, effect and/or dosage of one or more drugs, a therapeutic measure or the monitoring of a course of the disease and the course of therapy or etiology or classification of a disease, e.g., into a new or existing subtype or the differentiation of diseases and the patients thereof.

[0031] In a further embodiment of the invention, the term “stratification” covers in particular the risk stratification with the prognosis of an outcome of a negative health event.

[0032] Within the scope of this invention, “patient” means any test subject—human or mammal—with the proviso that the test subject is tested for neurodegenerative diseases.

[0033] The term “marker sequences” for the purposes of this invention means that the cDNA or the polypeptide or protein that can be respectively obtained therefrom are significant for neurodegenerative diseases. For example, the cDNA or the polypeptide or protein that can be respectively obtained therefrom can exhibit an interaction with substances from the body fluid or tissue extract of a patient with neurodegenerative diseases (e.g., antigen (epitope)/antibody (paratope) interaction). For the purposes of the invention “wherein at least one marker sequence of a cDNA selected from the group SEQ 1-927 or respectively a protein coding therefor or respectively a partial sequence or fragment thereof is determined on a patient to be examined” means that an interaction between the body fluid or tissue extract of a patient and the marker sequences according to the invention is detected. An interaction of this type is, e.g., a bond, in particular a binding substance on at least one marker sequence according to the invention or in the case of a cDNA the hybridization with a suitable substance under selected conditions, in particular stringent conditions (e.g., such as usually defined in J. Sambrook, E. F. Fritsch, T. Maniatis (1989), Molecular cloning: A laboratory manual, 2nd Edition, Cold Spring Harbor Laboratory Press, Cold Spring Harbor, USA or Ausubel, “Current Protocols in Molecular Biology,” Green Publishing Associates and Wiley Interscience, N.Y. (1989)). One example of stringent hybridization conditions is: hybridization in 4×SSC at 65° C. (alternatively in 50% formamide and 4×SSC at 42° C.), followed by several washing steps in 0.1×SSC at 65° C. for a total of approximately one hour. An example of less stringent hybridization conditions is hybridization in 4×SSC at 37° C., followed by several washing steps in 1×SSC at room temperature.

[0034] According to the invention, substances of this type are constituents of a body fluid, in particular blood, whole blood, blood plasma, blood serum, patient serum, urine, cerebrospinal fluid, synovial fluid or of a tissue extract of the patient.

[0035] In a further embodiment of the invention, however, the marker sequences according to the invention can be present in a significantly higher or lower expression rate or concentration that indicates neurodegenerative diseases. The relative sick/healthy expression rates of the marker sequences for neurodegenerative diseases according to the invention are hereby determined by means of proteomics or nucleic acid blotting.

[0036] In a further embodiment of the invention, the marker sequences have a recognition signal that is addressed to the substance to be bound (e.g., antibody, nucleic acid). It is preferred according to the invention for a protein the recognition signal is an epitope and/or a paratope and/or a hapten and for a cDNA is a hybridization or binding region.

[0037] The marker sequences according to the invention are the subject matter of Table A and can be clearly identified by the respectively cited database entry (also by means of the Internet: http://www.ncbi.nlm.nih.gov/) (see in Table A: accession No. there).

[0038] According to the invention, the marker sequences also cover those modifications of the cDNA sequence and the corresponding amino acid sequence as chemical modification, such as citrullination, acetylation, phosphorylation, glycosylation or poly(A) strand and other modifications known to one skilled in the art.

[0039] In a further embodiment of the invention, partial sequences or fragments of the marker sequences according to the invention are likewise covered. In particular those partial sequences that have an identity of 95%, 90%, in particular 80% or 70% with the marker sequences according to the invention.

[0040] In a further embodiment, the respective marker sequence can be represented in different quantities in one more regions on a solid support. This permits a variation of the sensitivity. The regions can have respectively a totality of marker sequences, i.e., a sufficient number of different marker sequences, in particular 2 to 5 or 10 or more and optionally more nucleic acids and/or proteins, in particular biomarkers. However, at least 96 to 25,000 (numerical) or more from different or identical marker sequences and further nucleic acids and/or proteins, in particular biomarkers are preferred. Furthermore preferred are more than 2,500, in particular preferred 10,000 or more different or identical marker sequences and optionally further nucleic acids and/or proteins, in particular biomarkers.

[0041] Another object of the invention relates to an arrangement of marker sequences containing at least one marker sequence of a cDNA selected from the group SEQ 1-927 in particular such respectively from the group SEQ 1-293, 294-664, 665-927 or respectively a protein coding therefor. Preferably, the arrangement contains at least 2 to 5 or 10, preferably 30 to 50 marker sequences or 50 to 100 or more marker sequences.

[0042] Within the scope of this invention, “arrangement” is synonymous with “array,” and if this “array” is used to identify substances on marker sequences, this is to be understood to be an “assay” or diagnostic device. In a preferred embodiment, the arrangement is designed such that the marker sequences represented on the arrangement are present in the form of a grid on a solid support. Furthermore, those arrangements are preferred that permit a high-density arrangement of protein binders and the marker sequences are spotted. Such high-density spotted arrangements are disclosed, for example, in WO 99/57311 and WO 99/57312 and can be used advantageously in a robot-supported automated high-throughput method.

[0043] Within the scope of this invention, however, the term “assay” or diagnostic device likewise comprises those embodiments of a device, such as ELISA, bead-based assay, line assay, Western Blot, immunochromatographic methods (e.g., lateral flow immunoassays) or similar immunological single or multiplex detection measures. A protein biochip in accordance with the invention is a systematic arrangement of proteins on a solid support.

[0044] The marker sequences of the arrangement are fixed on a solid support, but preferably spotted or immobilized even printed on, i.e. applied in a reproducible manner. One or more marker sequences can be present multiple times in the totality of all marker sequences and present in different quantities based on one spot. Furthermore, the marker sequences can be standardized on the solid support (i.e., by means of serial dilution series of, e.g., human globulins as internal calibrators for data normalization and quantitative evaluation).

[0045] The invention therefore relates to an assay or a protein biochip comprising an arrangement containing marker sequences according to the invention.

[0046] In a further embodiment, the marker sequences are present as clones. Clones of this type can be obtained, for example, by means of a cDNA expression library according to the invention (Büssow et al. 1998 (supra)). In a preferred embodiment, such expression libraries containing clones are obtained using expression vectors from a cDNA expression library comprising the cDNA marker sequences. These expression vectors preferably contain inducible promoters. The induction of the expression can be carried out, e.g., by means of an inductor, such as IPTG. Suitable expression vectors are described in Terpe et al. (Terpe T Appl Microbiol Biotechnol. 2003 January; 60(5): 523-33).

[0047] One skilled in the art is familiar with expression libraries, they can be produced according to standard works, such as Sambrook et al, “Molecular Cloning, A laboratory handbook, 2nd edition (1989), CSH press, Cold Spring Harbor, N.Y. Expression libraries are also preferred which are tissue-specific (e.g., human tissue, in particular human organs). Furthermore included according to the invention are expression libraries that can be obtained by exon-trapping. A synonym for expression library is expression bank.

[0048] Also preferred are protein biochips or corresponding expression libraries that do not exhibit any redundancy (so-called: Uniclone® library) and that may be produced, for example, according to the teachings of WO 99/57311 and WO 99/57312. These preferred Uniclone libraries have a high portion of non-defective fully expressed proteins of a cDNA expression library.

[0049] Within the context of this invention, the clones can also be, but not limited to, transformed bacteria, recombinant phages or transformed cells from mammals, insects, fungi, yeasts or plants.

[0050] The clones are fixed, spotted or immobilized on a solid support.

[0051] The invention therefore relates to an arrangement wherein the marker sequences are present as clones.

[0052] Additionally, the marker sequences can be present in the respective form of a fusion protein, which contains, for example, at least one affinity epitope or tag. The tag may be one such as contains c-myc, his tag, arg tag, FLAG, alkaline phosphatase, VS tag, T7 tag or strep tag, HAT tag, NusA, S tag, SBP tag, thioredoxin, DsbA, a fusion protein, preferably a cellulose-binding domain, green fluorescent protein, maltose-binding protein, calmodulin-binding protein, glutathione S-transferase or lacZ.

[0053] In all of the embodiments, the term “solid support” covers embodiments such as a filter, a membrane, a magnetic or fluorophore-labeled bead, a silica wafer, glass, metal, ceramics, plastics, a chip, a target for mass spectrometry or a matrix. However, a filter is preferred according to the invention.

[0054] As a filter, furthermore PVDF, nitrocellulose or nylon is preferred (e.g., Immobilon P Millipore, Protran Whatman, Hybond N+Amersham).

[0055] In another preferred embodiment of the arrangement according to the invention, the arrangement corresponds to a grid with the dimensions of a microtiter plate (8-12 wells strips, 96 wells, 384 wells or more), a silica wafer, a chip, a target for mass spectrometry, or a matrix.

[0056] In a further embodiment, the invention relates to an assay or a protein biochip for identifying and characterizing a substance for neurodegenerative diseases, characterized in that an arrangement or assay according to the invention is a.) brought into contact with at least one substance to be tested and b.) a binding success is detected.

[0057] Furthermore, the invention relates to a method for identifying and characterizing a substance for neurodegenerative diseases, characterized in that an arrangement or assay according to the invention is a.) brought into contact with at least one substance to be tested and b.) a binding success is detected.

[0058] The substance to be tested can be any native or non-native biomolecule, a synthetic chemical molecule, a mixture or a substance library.

[0059] After the substance to be tested contacts a marker sequence, the binding success is evaluated, which, for example, is carried out using commercially available image analyzing software (GenePix Pro (Axon Laboratories), Aida (Ray test), ScanArray (Packard Bioscience).

[0060] The visualization of protein-protein interactions according to the invention (e.g., protein on marker sequence, as antigen/antibody) or corresponding “means for detecting the binding success” can be performed, for example, using fluorescence labeling, biotinylation, radioisotope labeling or colloid gold or latex particle labeling in the usual way. A detection of bound antibodies is carried out with the aid of secondary antibodies, which are labeled with commercially available reporter molecules (e.g., Cy, Alexa, Dyomics, FITC or similar fluorescent dyes, colloidal gold or latex particles), or with reporter enzymes, such as alkaline phosphatase, horseradish peroxidase, etc., and the corresponding colorimetric, fluorescent or chemiluminescent substrates. Readout is conducted, e.g., using a microarray laser scanner, a CCD camera or visually.

[0061] In a further embodiment, the invention relates to a drug/active substance or prodrug developed for neurodegenerative diseases and obtainable through the use of the assay or protein biochip according to the invention.

[0062] The invention therefore likewise relates to the use of an arrangement according to the invention or an assay for screening active substances for neurodegenerative diseases.

[0063] In a further embodiment, the invention therefore likewise relates to a target for the treatment and therapy of neurodegenerative diseases respectively selected from the group SEQ 1-927 in particular such respectively from the group SEQ 1-293, 294-664, 665-927 or a protein respectively coding therefor.

[0064] In a further embodiment, the invention likewise relates to the use of the marker sequences according to the invention, preferably in the form of an arrangement, as an affinity material for carrying out an apheresis or in the broadest sense a blood lavage, wherein substances from body fluids of a patient with neurodegenerative diseases, such as blood or plasma, bind to the marker sequences according to the invention and consequently can be selectively withdrawn from the body fluid.

### EXAMPLES AND FIGURES

[0065] Ten or more patient samples were individually screened against a cDNA expression library. The neurodegenerative diseases-specific expression clones were determined through a comparison with ten or more healthy samples. The identity of the marker sequences was determined by DNA sequencing.

[0066] FIG. 1 shows the differential screening between two protein biochips from respectively one cDNA expression bank of a patient and a healthy test subject. The differential clones are detected by means of fluorescent labeling and evaluated by means of bioinformatics.

TABLE A

| | |
|---|---|
| 1. | NM_001823 |
| 2. | NM_000969 |
| 3. | NM_152429 |
| 4. | NM_000968 |
| 5. | NM_024671 |
| 6. | NM_001040134 |
| 7. | NM_001024 |
| 8. | NT_011515 |
| 9. | NM_001823 |
| 10. | NM_004521 |
| 11. | NM_032514 |
| 12. | NM_004559 |
| 13. | NW_927762 |
| 14. | NM_002660 |
| 15. | NW_927173 |
| 16. | NM_022751 |
| 17. | NM_017489 |
| 18. | NM_003170 |
| 19. | NM_032364 |
| 20. | NM_004890 |
| 21. | NM_020753 |
| 22. | NM_000969 |
| 23. | NT_011109 |
| 24. | NM_002383 |
| 25. | NM_004218 |
| 26. | NM_002702 |
| 27. | NM_001032396 |
| 28. | NM_006986 |
| 29. | NM_001226 |
| 30. | NM_001823 |
| 31. | |
| 32. | |
| 33. | NM_001032396 |
| 34. | NM_007241 |
| 35. | NM_172231 |
| 36. | NM_000969 |
| 37. | NM_002383 |
| 38. | NM_003134 |
| 39. | NM_138559 |
| 40. | NM_001409 |
| 41. | NM_032514 |
| 42. | NM_002306 |
| 43. | NM_002579 |
| 44. | NM_020764 |
| 45. | NM_006045 |
| 46. | |
| 47. | NM_004890 |
| 48. | NM_173551 |
| 49. | NM_006035 |
| 50. | NM_019082 |
| 51. | NM_004436 |
| 52. | NM_001002261 |
| 53. | NM_001040134 |
| 54. | NM_181697 |
| 55. | NM_001018097 |
| 56. | NM_002032 |
| 57. | NM_004968 |
| 58. | NM_152705 |
| 59. | XM_944677 |
| 60. | NM_004712 |
| 61. | NM_018091 |
| 62. | NM_004559 |
| 63. | NT_022135 |
| 64. | NM_007346 |
| 65. | NT_011295 |
| 66. | NM_002475 |
| 67. | XM_001126255 |
| 68. | NM_006160 |
| 69. | XM_001129232 |
| 70. | NM_016406 |
| 71. | NM_016139 |
| 72. | NM_015144 |
| 73. | NM_001823 |
| 74. | NT_011362 |
| 75. | |
| 76. | NM_000992 |
| 77. | NM_004559 |
| 78. | NM_001018097 |
| 79. | XM_001126014 |
| 80. | NM_001016 |
| 81. | XM_001126126 |
| 82. | NM_020166 |
| 83. | NM_031454 |
| 84. | NM_002383 |
| 85. | NM_004699 |
| 86. | NM_183380 |
| 87. | NM_014851 |
| 88. | NM_020710 |
| 89. | |
| 90. | NT_037887 |
| 91. | NW_926539 |
| 92. | NM_001262 |
| 93. | NM_003758 |
| 94. | XM_001129232 |
| 95. | NM_003434 |
| 96. | NM_001006 |
| 97. | NM_002741 |
| 98. | NW_926561 |
| 99. | NM_000127 |
| 100. | NM_004192 |
| 101. | NM_023926 |
| 102. | NM_001037328 |
| 103. | XM_001132864 |
| 104. | NM_000129 |
| 105. | NM_001823 |
| 106. | NM_005517 |
| 107. | NM_020166 |
| 108. | NM_006644 |
| 109. | NM_018442 |
| 110. | NM_001894 |
| 111. | NM_005967 |
| 112. | NM_002714 |
| 113. | NM_016333 |
| 114. | NM_024040 |
| 115. | NW_923572 |
| 116. | NT_004487 |
| 117. | NT_011362 |
| 118. | NM_004890 |
| 119. | NM_178314 |
| 120. | NM_006353 |
| 121. | NM_005861 |
| 122. | NM_002613 |
| 123. | NT_017795 |
| 124. | NM_002475 |
| 125. | NM_012398 |
| 126. | NM_006185 |
| 127. | NT_035014 |
| 128. | NM_152600 |
| 129. | XR_018227 |
| 130. | NT_011255 |
| 131. | NM_001823 |
| 132. | NM_182924 |
| 133. | NM_002714 |
| 134. | XM_001129992 |
| 135. | NM_001658 |
| 136. | NW_927173 |
| 137. | NM_001312 |
| 138. | NM_001823 |
| 139. | NM_032019 |
| 140. | NM_004838 |
| 141. | NM_005984 |
| 142. | NM_012398 |
| 143. | NM_001312 |
| 144. | NM_005474 |
| 145. | NM_031157 |
| 146. | NM_012088 |
| 147. | NT_004487 |
| 148. | NM_005517 |
| 149. | NM_006244 |
| 150. | NM_006185 |
| 151. | NM_001823 |
| 152. | NM_006003 |
| 153. | NT_019197 |
| 154. | XM_001126014 |
| 155. | NM_003502 |
| 156. | NM_016300 |
| 157. | NM_194279 |
| 158. | |
| 159. | NM_022156 |
| 160. | |
| 161. | NM_001024 |
| 162. | NM_018083 |
| 163. | NT_011630 |
| 164. | NM_000076 |
| 165. | XR_018762 |
| 166. | NM_138360 |
| 167. | NM_014077 |
| 168. | NT_011726 |
| 169. | NT_032977 |
| 170. | |
| 171. | NM_002337 |
| 172. | NM_002475 |
| 173. | NM_134269 |
| 174. | NM_001658 |
| 175. | NM_005442 |
| 176. | XM_001129992 |
| 177. | NM_002824 |
| 178. | NM_004295 |
| 179. | NM_021991 |
| 180. | NM_152994 |
| 181. | NM_016162 |
| 182. | NM_006841 |
| 183. | NM_018649 |
| 184. | NM_014699 |
| 185. | NM_002013 |
| 186. | NM_001040134 |
| 187. | NM_033112 |
| 188. | NM_016841 |
| 189. | NW_927628 |
| 190. | NM_016035 |
| 191. | NM_006446 |
| 192. | NM_004380 |
| 193. | NW_924796 |
| 194. | NM_005736 |
| 195. | NM_032514 |
| 196. | NT_010542 |
| 197. | NM_002383 |
| 198. | |
| 199. | NM_002013 |
| 200. | NM_001658 |
| 201. | NM_059270 |
| 202. | NM_002475 |
| 203. | NM_001032396 |
| 204. | NT_011387 |
| 205. | NM_012398 |
| 206. | NM_080390 |
| 207. | NM_006003 |
| 208. | XM_001128735 |
| 209. | NM_012115 |
| 210. | NM_152345 |
| 211. | NM_005937 |
| 212. | NM_020967 |
| 213. | |
| 214. | NM_006263 |
| 215. | NT_008583 |
| 216. | NM_138360 |
| 217. | NM_005861 |
| 218. | |
| 219. | NM_023926 |
| 220. | NM_021727 |
| 221. | NM_001185 |
| 222. | XM_001132509 |
| 223. | XM_001129992 |
| 224. | NM_152994 |
| 225. | NM_017934 |
| 226. | NM_002516 |
| 227. | NM_001010926 |
| 228. | NM_004968 |
| 229. | NM_016372 |
| 230. | NM_016265 |
| 231. | NM_005586 |
| 232. | NM_001001852 |
| 233. | NT_022221 |
| 234. | NM_004559 |
| 235. | NM_030795 |
| 236. | NM_020710 |
| 237. | XM_001132706 |
| 238. | XM_938104 |
| 239. | NM_017602 |
| 240. | NM_005474 |
| 241. | NM_002383 |
| 242. | NM_016162 |
| 243. | NM_005851 |
| 244. | NM_001014765 |
| 245. | NM_002735 |
| 246. | NT_008413 |
| 247. | NM_003434 |
| 248. | NM_020710 |
| 249. | NM_012088 |
| 250. | NM_030795 |
| 251. | NM_004838 |
| 252. | NM_152856 |
| 253. | |
| 254. | NM_022898 |
| 255. | NT_113901 |
| 256. | NM_002504 |
| 257. | NM_003827 |
| 258. | |
| 259. | NM_002512 |
| 260. | NM_013271 |
| 261. | NM_006244 |
| 262. | NM_022751 |
| 263. | NM_000972 |
| 264. | NM_005861 |
| 265. | NM_032025 |
| 266. | NM_002383 |
| 267. | NT_008413 |
| 268. | NM_001014 |
| 269. | NM_002751 |
| 270. | NM_024946 |
| 271. | XM_001132706 |
| 272. | NM_005861 |
| 273. | NT_010755 |
| 274. | XM_001129992 |
| 275. | NM_001012508 |
| 276. | NM_012225 |
| 277. | NM_002085 |
| 278. | |
| 279. | NM_030795 |
| 280. | NT_010393 |
| 281. | NM_005861 |
| 282. | NM_003134 |
| 283. | NT_025215 |
| 284. | NM_012398 |
| 285. | NM_005861 |
| 286. | NM_199368 |
| 287. | |
| 288. | NM_005861 |
| 289. | NM_033082 |
| 290. | NM_024832 |
| 291. | NM_006374 |
| 292. | NT_016354 |
| 293. | NM_031209 |
| 294. | NM_001009184 |
| 295. | NM_001614 |
| 296. | NM_001614 |
| 297. | NM_178012 |
| 298. | NM_178012 |
| 299. | NM_021102 |
| 300. | NM_178014 |
| 301. | NM_002003 |
| 302. | NM_005053 |
| 303. | NM_005805 |
| 304. | NM_184041 |
| 305. | XM_001129992 |
| 306. | NM_001961 |
| 307. | NT_077661 |
| 308. | NM_001614 |
| 309. | NT_034880 |
| 310. | NM_138360 |
| 311. | NM_018023 |
| 312. | NM_182498 |
| 313. | NM_001614 |
| 314. | NM_005507 |
| 315. | NM_194460 |
| 316. | NM_001428 |
| 317. | NM_005778 |
| 318. | NM_001614 |
| 319. | NM_001614 |
| 320. | NM_022756 |
| 321. | NM_001810 |
| 322. | XR_015390 |
| 323. | NM_184041 |
| 324. | NW_927628 |
| 325. | NT_032977 |
| 326. | NT_010783 |
| 327. | NM_002256 |
| 328. | NM_182810 |
| 329. | NM_005053 |
| 330. | NM_001416 |
| 331. | NM_182810 |
| 332. | NM_001418 |
| 333. | NM_031209 |
| 334. | XM_001125744 |
| 335. | NM_053052 |
| 336. | NM_004181 |
| 337. | NM_000076 |
| 338. | NM_001614 |
| 339. | NM_182923 |
| 340. | NM_001614 |
| 341. | XM_936789 |
| 342. | NM_001614 |
| 343. | NM_001614 |
| 344. | NM_006148 |
| 345. | NT_011295 |
| 346. | NM_005275 |
| 347. | NT_010641 |
| 348. | NM_001005367 |
| 349. | NM_005563 |
| 350. | NT_034880 |
| 351. | NM_172231 |
| 352. | NM_005053 |
| 353. | NM_184041 |
| 354. | NT_006713 |
| 355. | NT_006713 |
| 356. | NM_182810 |
| 357. | NM_174908 |
| 358. | NM_006907 |
| 359. | NM_004394 |
| 360. | NM_003199 |
| 361. | NM_012408 |
| 362. | NM_001960 |
| 363. | NM_002134 |
| 364. | NM_016139 |
| 365. | NM_001013440 |
| 366. | NM_016410 |
| 367. | NW_927206 |
| 368. | NM_144679 |
| 369. | NM_152562 |
| 370. | NM_000034 |
| 371. | NM_031464 |
| 372. | NM_015654 |
| 373. | NM_005918 |
| 374. | NT_011295 |
| 375. | NM_000108 |
| 376. | NM_003199 |
| 377. | NM_002168 |
| 378. | NM_006527 |
| 379. | NM_182810 |
| 380. | NM_022104 |
| 381. | NM_182640 |
| 382. | NM_001493 |
| 383. | NM_001493 |
| 384. | NM_184041 |
| 385. | NM_002168 |
| 386. | NM_015902 |
| 387. | NM_006311 |
| 388. | NM_018270 |
| 389. | NM_001030 |
| 390. | NM_001013440 |
| 391. | NM_016310 |
| 392. | XM_946191 |
| 393. | NM_001313 |
| 394. | NT_004350 |
| 395. | NM_005805 |
| 396. | NM_014190 |
| 397. | NM_031449 |
| 398. | NW_925940 |
| 399. | NM_138414 |
| 400. | NM_001212 |
| 401. | NM_001961 |
| 402. | NM_000034 |
| 403. | NM_001007553 |
| 404. | XM_001129992 |
| 405. | NM_005801 |
| 406. | NM_003564 |
| 407. | XM_001128169 |
| 408. | NM_182923 |
| 409. | NT_011638 |
| 410. | NM_182810 |
| 411. | NM_182810 |
| 412. | NM_003824 |
| 413. | NM_016410 |
| 414. | NM_003824 |
| 415. | NM_006201 |
| 416. | NM_080390 |
| 417. | NT_011651 |
| 418. | NM_194279 |
| 419. | NT_033903 |
| 420. | NM_001618 |
| 421. | NM_001037328 |
| 422. | NT_011651 |
| 423. | NM_006402 |
| 424. | XM_001125744 |
| 425. | NM_033010 |
| 426. | NM_021991 |
| 427. | NM_000034 |
| 428. | NM_006397 |
| 429. | NM_032514 |
| 430. | NT_011726 |
| 431. | NM_000280 |
| 432. | NM_001313 |
| 433. | NM_182810 |
| 434. | NM_001743 |
| 435. | NM_001013436 |
| 436. | NM_138414 |
| 437. | NM_182923 |
| 438. | NM_016525 |
| 439. | NM_001031696 |
| 440. | NM_015392 |
| 441. | XM_001126126 |
| 442. | NM_022109 |
| 443. | NW_927339 |
| 444. | NM_182970 |
| 445. | NM_013265 |
| 446. | NM_022749 |
| 447. | NM_005801 |
| 448. | NM_182498 |
| 449. | NM_001313 |
| 450. | NM_001404 |
| 451. | NM_006003 |
| 452. | NM_018011 |
| 453. | NM_005053 |
| 454. | NM_005801 |
| 455. | NM_005778 |
| 456. | NT_033903 |
| 457. | XM_042698 |
| 458. | NT_022517 |
| 459. | NM_005801 |
| 460. | XM_941139 |
| 461. | NM_184041 |
| 462. | NM_016310 |
| 463. | NT_032977 |
| 464. | NW_923651 |
| 465. | NM_020160 |
| 466. | NM_182810 |
| 467. | NM_012235 |
| 468. | XM_001129992 |
| 469. | NM_012398 |
| 470. | NM_001001894 |
| 471. | NM_015949 |
| 472. | NM_181471 |
| 473. | NM_001810 |
| 474. | NM_016093 |
| 475. | NM_174908 |
| 476. | NM_022063 |
| 477. | NM_184041 |
| 478. | NM_001614 |
| 479. | NM_022063 |
| 480. | NM_206852 |
| 481. | XM_939572 |
| 482. | NM_001008800 |
| 483. | NT_007933 |
| 484. | NT_010641 |
| 485. | XM_001129992 |
| 486. | NM_022359 |
| 487. | NM_182810 |
| 488. | NM_030928 |
| 489. | NM_032514 |
| 490. | NM_022063 |
| 491. | NM_182810 |
| 492. | NM_004838 |
| 493. | NW_925840 |
| 494. | NM_015710 |
| 495. | NM_023009 |
| 496. | NM_002046 |
| 497. | NM_005805 |
| 498. | NM_005998 |
| 499. | NM_174908 |
| 500. | NT_032977 |
| 501. | NM_001313 |
| 502. | NM_005778 |
| 503. | NT_009237 |
| 504. | NM_006058 |
| 505. | NM_015449 |
| 506. | NM_001675 |
| 507. | NM_001614 |
| 508. | NM_005998 |
| 509. | NM_006034 |
| 510. | NM_177967 |
| 511. | NM_004429 |
| 512. | NM_181471 |
| 513. | NM_004788 |
| 514. | NM_001034024 |
| 515. | XM_001127831 |
| 516. | NM_005998 |
| 517. | NM_152464 |
| 518. | NT_024871 |
| 519. | NM_004838 |
| 520. | NM_002256 |
| 521. | NM_002778 |
| 522. | NM_005146 |
| 523. | NM_001009813 |
| 524. | NM_005586 |
| 525. | NM_001959 |
| 526. | NM_014780 |
| 527. | XM_001128413 |
| 528. | NM_004321 |
| 529. | NM_001033677 |
| 530. | NM_032932 |
| 531. | NM_006223 |
| 532. | NM_032451 |
| 533. | XM_936897 |
| 534. | NM_016175 |
| 535. | NM_004544 |
| 536. | NM_001183 |
| 537. | NM_005918 |
| 538. | NM_018061 |
| 539. | NT_030188 |
| 540. | NM_178012 |
| 541. | NM_001614 |
| 542. | NM_007368 |
| 543. | NM_182810 |
| 544. | NM_005334 |
| 545. | NM_016841 |
| 546. | NM_001002 |
| 547. | NW_922162 |
| 548. | NM_001961 |
| 549. | NM_002949 |
| 550. | NM_005998 |
| 551. | NM_184041 |
| 552. | NM_016525 |
| 553. | NM_152345 |
| 554. | XR_017611 |
| 555. | NW_926918 |
| 556. | NM_030907 |
| 557. | NM_001810 |
| 558. | NW_924884 |
| 559. | NT_007592 |
| 560. | NM_014412 |
| 561. | NM_152992 |
| 562. | NM_001823 |
| 563. | NM_080667 |
| 564. | NM_020644 |
| 565. | NM_004615 |
| 566. | NM_002095 |
| 567. | NM_002741 |
| 568. | NM_023009 |
| 569. | NM_001961 |
| 570. | NM_004870 |
| 571. | NM_001958 |
| 572. | NW_921918 |
| 573. | NM_016645 |
| 574. | NM_006841 |
| 575. | NM_005805 |
| 576. | NM_032119 |
| 577. | NT_006238 |
| 578. | NM_170750 |
| 579. | NM_014713 |
| 580. | NM_016292 |
| 581. | NM_001678 |
| 582. | NW_922496 |
| 583. | NM_006642 |
| 584. | NM_019613 |
| 585. | XM_943869 |
| 586. | NT_024871 |
| 587. | NM_173519 |
| 588. | NM_207356 |
| 589. | NM_178012 |
| 590. | NM_184041 |
| 591. | NM_184041 |
| 592. | NM_005726 |
| 593. | NT_029419 |
| 594. | NM_001006938 |
| 595. | NM_178012 |
| 596. | NM_003130 |
| 597. | NM_181509 |
| 598. | NW_922784 |
| 599. | NM_012398 |
| 600. | NM_000034 |
| 601. | NM_182810 |
| 602. | NM_005891 |
| 603. | NM_032180 |
| 604. | NM_003199 |
| 605. | NM_001313 |
| 606. | NM_018204 |
| 607. | NM_006527 |
| 608. | NM_016003 |
| 609. | NM_152992 |
| 610. | NM_004181 |
| 611. | NM_198901 |
| 612. | NW_927384 |
| 613. | NM_032447 |
| 614. | NM_019843 |
| 615. | NT_011726 |
| 616. | XM_935548 |
| 617. | NT_010966 |
| 618. | XM_001133009 |
| 619. | NM_033510 |
| 620. | NM_000136 |
| 621. | NT_011387 |
| 622. | NM_001794 |
| 623. | NT_037887 |
| 624. | NT_011520 |
| 625. | NM_001101 |
| 626. | NM_203462 |
| 627. | NW_926528 |
| 628. | NM_005801 |
| 629. | NM_001614 |
| 630. | NT_010663 |
| 631. | NT_113906 |
| 632. | NM_001002 |
| 633. | NT_032977 |
| 634. | XM_001129992 |
| 635. | NM_022756 |
| 636. | NM_018723 |
| 637. | NM_004445 |
| 638. | NM_005053 |
| 639. | NM_014713 |
| 640. | NT_030059 |
| 641. | NM_014934 |
| 642. | NM_182471 |
| 643. | NM_033064 |
| 644. | NM_003677 |
| 645. | NT_007592 |
| 646. | NM_199368 |
| 647. | NM_021871 |
| 648. | NM_016836 |
| 649. | NM_184041 |
| 650. | NM_012115 |
| 651. | NM_184041 |
| 652. | NM_012279 |
| 653. | NT_079573 |
| 654. | NM_020465 |
| 655. | NM_014190 |
| 656. | NM_001034996 |
| 657. | NM_006527 |
| 658. | NM_005778 |
| 659. | NM_002168 |
| 660. | NM_016645 |
| 661. | NM_184041 |
| 662. | NM_020309 |
| 663. | NT_037887 |
| 664. | NM_005852 |
| 665. | NT_011295 |
| 666. | NM_001402 |
| 667. | NM_032281 |
| 668. | NM_000127 |
| 669. | NM_001006 |
| 670. | NM_002085 |
| 671. | NM_003973 |
| 672. | NM_001409 |
| 673. | NM_182471 |
| 674. | NM_024046 |
| 675. | NM_002952 |
| 676. | NM_005937 |
| 677. | NM_006221 |
| 678. | NT_011630 |
| 679. | NM_001001894 |
| 680. | NM_003824 |
| 681. | NM_004521 |
| 682. | NM_002383 |
| 683. | NM_152383 |
| 684. | NM_014405 |
| 685. | NM_024996 |
| 686. | NT_008413 |
| 687. | NM_006563 |
| 688. | NM_001419 |
| 689. | NM_000978 |
| 690. | NW_927206 |
| 691. | NM_014851 |
| 692. | NT_010641 |
| 693. | NT_009775 |
| 694. | NM_032333 |
| 695. | NM_001002246 |
| 696. | NM_006349 |
| 697. | NM_001553 |
| 698. | XM_001129992 |
| 699. | NM_033301 |
| 700. | NM_000784 |
| 701. | NM_001016 |
| 702. | NT_006713 |
| 703. | NM_014741 |
| 704. | NT_008413 |
| 705. | NM_001030009 |
| 706. | NM_002512 |
| 707. | NM_001017 |
| 708. | NM_006013 |
| 709. | NT_010966 |
| 710. | NM_052880 |
| 711. | NM_178012 |
| 712. | NM_031157 |
| 713. | NM_003769 |
| 714. | NM_002134 |
| 715. | NT_011109 |
| 716. | NM_017596 |
| 717. | NT_010718 |
| 718. | NW_927206 |
| 719. | NM_152395 |
| 720. | NM_030795 |
| 721. | NM_174920 |
| 722. | NW_924884 |
| 723. | NM_021149 |
| 724. | NM_003130 |
| 725. | NM_001686 |
| 726. | NM_012088 |
| 727. | NM_003756 |
| 728. | NM_138795 |
| 729. | NM_012323 |
| 730. | NM_016453 |
| 731. | NM_000980 |
| 732. | NM_152509 |
| 733. | NM_002032 |
| 734. | XM_001133535 |
| 735. | NM_145798 |
| 736. | NM_003824 |
| 737. | NM_080390 |
| 738. | NM_002383 |
| 739. | NM_002383 |
| 740. | NM_001005920 |
| 741. | NT_017795 |
| 742. | NT_010393 |
| 743. | NM_138559 |
| 744. | NM_012088 |
| 745. | NM_006185 |
| 746. | NT_008470 |
| 747. | NM_006009 |
| 748. | NT_010783 |
| 749. | NM_016406 |
| 750. | XM_001126126 |
| 751. | NM_012398 |
| 752. | NM_002085 |
| 753. | NM_006428 |
| 754. | NM_006185 |
| 755. | NM_138795 |
| 756. | NT_029419 |
| 757. | NM_030795 |
| 758. | NM_138795 |
| 759. | NM_006353 |
| 760. | NM_019845 |
| 761. | NM_006009 |
| 762. | NM_001017 |
| 763. | NM_002085 |
| 764. | XM_939572 |
| 765. | NM_002094 |
| 766. | NM_012088 |
| 767. | NT_019546 |
| 768. | NT_019197 |
| 769. | NM_002383 |
| 770. | NT_019197 |
| 771. | NM_004192 |
| 772. | NW_927206 |
| 773. | NM_002383 |
| 774. | NM_030818 |
| 775. | NT_009237 |
| 776. | NT_011295 |
| 777. | NM_080621 |
| 778. | NM_006009 |
| 779. | NM_023926 |
| 780. | NT_009237 |
| 781. | NM_032014 |
| 782. | NM_012225 |
| 783. | NM_005654 |
| 784. | NM_016162 |
| 785. | NM_030795 |
| 786. | NT_009237 |
| 787. | NM_016372 |
| 788. | NM_004295 |
| 789. | NM_003134 |
| 790. | NM_001416 |
| 791. | NM_021991 |
| 792. | XM_001129992 |
| 793. | NM_002035 |
| 794. | NM_138795 |
| 795. | NW_927206 |
| 796. | NM_001959 |
| 797. | XM_001132864 |
| 798. | NM_018008 |
| 799. | NM_030795 |
| 800. | NM_002383 |
| 801. | NM_022898 |
| 802. | NM_006223 |
| 803. | NM_021149 |
| 804. | NM_001018097 |
| 805. | NT_010718 |
| 806. | NM_018061 |
| 807. | NM_002383 |
| 808. | NM_031454 |
| 809. | NT_022778 |
| 810. | NM_001002261 |
| 811. | NM_002032 |
| 812. | NM_001262 |
| 813. | NM_005736 |
| 814. | NW_927339 |
| 815. | NM_152247 |
| 816. | NM_004218 |
| 817. | NM_181697 |
| 818. | NM_006045 |
| 819. | NM_005276 |
| 820. | NM_002733 |
| 821. | XR_017611 |
| 822. | NM_018649 |
| 823. | NT_010498 |
| 824. | NM_002613 |
| 825. | NM_018083 |
| 826. | NM_014944 |
| 827. | NM_006373 |
| 828. | NM_000969 |
| 829. | NM_024671 |
| 830. | NW_927762 |
| 831. | XR_017611 |
| 832. | NM_001002261 |
| 833. | NT_023133 |
| 834. | XM_001127128 |
| 835. | NM_001017 |
| 836. | NT_016354 |
| 837. | NM_014405 |
| 838. | NM_020320 |
| 839. | NM_024046 |
| 840. | NM_016645 |
| 841. | NW_921585 |
| 842. | NM_018116 |
| 843. | NM_002085 |
| 844. | NM_003434 |
| 845. | NM_003434 |
| 846. | NM_001006 |
| 847. | NM_012398 |
| 848. | NM_001006 |
| 849. | NM_005851 |
| 850. | NT_011109 |
| 851. | NM_024040 |
| 852. | NM_006035 |
| 853. | NM_016406 |
| 854. | NM_012225 |
| 855. | NM_152247 |
| 856. | NT_010393 |
| 857. | NM_030818 |
| 858. | NT_026437 |
| 859. | NM_032180 |
| 860. | NM_002475 |
| 861. | NT_011109 |
| 862. | NM_002743 |
| 863. | NM_004968 |
| 864. | NM_000738 |
| 865. | NM_138795 |
| 866. | NM_022839 |
| 867. | NT_010194 |
| 868. | NM_001005362 |
| 869. | NW_921807 |
| 870. | NM_182471 |
| 871. | NW_926561 |
| 872. | NM_182471 |
| 873. | NM_002306 |
| 874. | NT_022184 |
| 875. | XM_001126014 |
| 876. | NT_037622 |
| 877. | NM_017789 |
| 878. | NM_033647 |
| 879. | NM_024671 |
| 880. | NM_001873 |
| 881. | XM_001128735 |
| 882. | NM_018083 |
| 883. | NT_011515 |
| 884. | NT_032977 |
| 885. | NM_014077 |
| 886. | NM_004890 |
| 887. | NM_001017 |
| 888. | NM_003827 |
| 889. | NM_001226 |
| 890. | NM_021975 |
| 891. | XM_001132509 |
| 892. | NM_018200 |
| 893. | NT_029928 |
| 894. | NT_079595 |
| 895. | NM_016162 |
| 896. | NM_032333 |
| 897. | NM_005861 |
| 898. | NM_033082 |
| 899. | NM_020465 |
| 900. | NM_001997 |
| 901. | NM_021130 |
| 902. | NM_001034996 |
| 903. | NM_138493 |
| 904. | NM_182471 |
| 905. | NM_006817 |
| 906. | NM_198155 |
| 907. | NT_037887 |
| 908. | NW_923907 |
| 909. | NT_011109 |
| 910. | NM_006003 |
| 911. | NW_927206 |
| 912. | NM_006003 |
| 913. | NT_011638 |
| 914. | NM_002825 |
| 915. | NM_005225 |
| 916. | NM_001002246 |
| 917. | NM_006428 |
| 918. | NM_004968 |
| 919. | NM_001894 |
| 920. | NM_145806 |
| 921. | NM_024888 |
| 922. | NM_006963 |
| 923. | NM_018083 |
| 924. | NM_000967 |
| 925. | NM_006003 |
| 926. | NM_016264 |
| 927. | NM_000975 |

The application's sequence listing, which the Patent Office published only in electronic form, follows.

SEQUENCE LISTING (927 sequences)

SEQ ID NO: 1 - DNA, 1385 bp, Homo Sapiens
  misc_feature (626)..(626): n is a, c, g, or t
  misc_feature (791)..(791): n is a, c, g, or t
  misc_feature (860)..(860): n is a, c, g, or t
  misc_feature (880)..(880): n is a, c, g, or t
  misc_feature (907)..(907): n is a, c, g, or t
  misc_feature (919)..(919): n is a, c, g, or t
  misc_feature (922)..(922): n is a, c, g, or t
  misc_feature (934)..(934): n is a, c, g, or t
  misc_feature (949)..(949): n is a, c, g, or t
  misc_feature (951)..(951): n is a, c, g, or t
  misc_feature (966)..(966): n is a, c, g, or t
  misc_feature (975)..(975): n is a, c, g, or t
  misc_feature (985)..(985): n is a, c, g, or t
  misc_feature (998)..(998): n is a, c, g, or t
  misc_feature (1008)..(1008): n is a, c, g, or t
  misc_feature (1021)..(1021): n is a, c, g, or t
  misc_feature (1030)..(1030): n is a, c, g, or t
  misc_feature (1032)..(1032): n is a, c, g, or t
  misc_feature (1045)..(1045): n is a, c, g, or t
  misc_feature (1048)..(1048): n is a, c, g, or t
  misc_feature (1051)..(1051): n is a, c, g, or t
  misc_feature (1056)..(1056): n is a, c, g, or t
  misc_feature (1060)..(1060): n is a, c, g, or t
  misc_feature (1067)..(1067): n is a, c, g, or t
  misc_feature (1071)..(1071): n is a, c, g, or t
  misc_feature (1079)..(1079): n is a, c, g, or t
  misc_feature (1090)..(1090): n is a, c, g, or t
  misc_feature (1097)..(1098): n is a, c, g, or t
  misc_feature (1104)..(1105): n is a, c, g, or t
  misc_feature (1111)..(1112): n is a, c, g, or t
  misc_feature (1114)..(1114): n is a, c, g, or t
  misc_feature (1117)..(1117): n is a, c, g, or t
  misc_feature (1122)..(1125): n is a, c, g, or t
  misc_feature (1127)..(1127): n is a, c, g, or t
  misc_feature (1136)..(1136): n is a, c, g, or t
  misc_feature (1141)..(1141): n is a, c, g, or t
  misc_feature (1146)..(1146): n is a, c, g, or t
  misc_feature (1161)..(1161): n is a, c, g, or t
  misc_feature (1167)..(1167): n is a, c, g, or t
  misc_feature (1171)..(1172): n is a, c, g, or t
  misc_feature (1174)..(1174): n is a, c, g, or t
  misc_feature (1180)..(1180): n is a, c, g, or t
  misc_feature (1193)..(1193): n is a, c, g, or t
  misc_feature (1195)..(1195): n is a, c, g, or t
  misc_feature (1197)..(1197): n is a, c, g, or t
  misc_feature (1199)..(1199): n is a, c, g, or t
  misc_feature (1201)..(1203): n is a, c, g, or t
  misc_feature (1206)..(1209): n is a, c, g, or t
  misc_feature (1211)..(1211): n is a, c, g, or t
  misc_feature (1217)..(1219): n is a, c, g, or t
  misc_feature (1222)..(1223): n is a, c, g, or t
  misc_feature (1226)..(1226): n is a, c, g, or t
  misc_feature (1239)..(1240): n is a, c, g, or t
  misc_feature (1242)..(1242): n is a, c, g, or t
  misc_feature (1244)..(1244): n is a, c, g, or t
  misc_feature (1247)..(1247): n is a, c, g, or t
  misc_feature (1249)..(1253): n is a, c, g, or t
  misc_feature (1257)..(1257): n is a, c, g, or t
  misc_feature (1278)..(1278): n is a, c, g, or t
  misc_feature (1280)..(1281): n is a, c, g, or t
  misc_feature (1283)..(1284): n is a, c, g, or t
  misc_feature (1287)..(1287): n is a, c, g, or t
  misc_feature (1292)..(1294): n is a, c, g, or t
  misc_feature (1297)..(1297): n is a, c, g, or t
  misc_feature (1301)..(1301): n is a, c, g, or t
  misc_feature (1303)..(1304): n is a, c, g, or t
  misc_feature (1309)..(1309): n is a, c, g, or t
  misc_feature (1313)..(1315): n is a, c, g, or t
  misc_feature (1319)..(1320): n is a, c, g, or t
  misc_feature (1322)..(1322): n is a, c, g, or t
  misc_feature (1325)..(1325): n is a, c, g, or t
  misc_feature (1328)..(1328): n is a, c, g, or t
  misc_feature (1331)..(1334): n is a, c, g, or t
  misc_feature (1338)..(1343): n is a, c, g, or t
  misc_feature (1346)..(1347): n is a, c, g, or t
  misc_feature (1351)..(1351): n is a, c, g, or t
  misc_feature (1357)..(1360): n is a, c, g, or t
  misc_feature (1362)..(1363): n is a, c, g, or t
  misc_feature (1376)..(1378): n is a, c, g, or t
  misc_feature (1381)..(1381): n is a, c, g, or t
  misc_feature (1383)..(1383): n is a, c, g, or t
aatagagagattactatgagaggatcgcatcaccattcaccatcacggatcctatttaggtgacactatagaatcgtcgacccacgcgtccggcgtcgctccgggagctgccgacggacggagcgcccccgcccccgcccggccgcccgcccgccgccgccatgcccttctccaacagccacaacgcactgaagctgcgcttcccggccgaggacgagttccccgacctgagcgcccacaacaaccacatggccaaggtgctgacccccgagctgtacgcggagctgcgcgccaagagcacgccgagcggcttcacgctggacgacgtcatccagacaggcgtggacaacccgggccacccgtacatcatgaccgtgggctgcgtggcgggcgacgaggagtcctacgaagtgttcaaggatctcttcgaccccatcatcgaggaccggcacggcggctacaagcccagcgatgagcacaagaccgacctcaaccccgacaacctgcagggcggcgacgacctggaccccaactacgtgctgagctcgcgggtgcgcacgggccgcagcatccgtggcttctgcctccccccgcactgcagccgcggggagcgccgcgccatcganaagctcgcggtggaagccctgtccagcctggacggcgacctggcgggccgatactacgcgctcaagagcatgacggaggcggagcagcagcagctcatcgacgaccacttcctcttcgacaagcccgtgtcgcccctgctgctggcctcgggcatggcccgcgantggtccgacgcccgcggtatctggcacaatgacaataaaaccttcctggtgtgggtcaacgaaggaggnaccacctgcgggtcatctcnatgcaaaaggggggcaaaatgaaggangtgttcacccgnttntgcaccggcctnaccaaattgaaactntntttaagtctaaggantatgagttnatgtggaaanccttcacctgggntaaattcttnaacttgcccatcnaaactgggnancggggttgggggnagngtntatantaangttgccnaacntgggaaanatgaaaatttntcgaagnntttaanngggttnnanttnaaaannnngncaagggggnggaanggttncggggggggtttttnaatttncaanntnaacccntggtttttaaagngnantngnnnaannnngnggaaannnaannttntttaaaaaaaaanntngnaangnnnnntttnaaaattttttccaaaaaaaancnncnncanaaaannnttntttnannttttngggnnncccnnanccnttnttnnnngggnnnnnnttnnaaantccccnnnnannttttttggaaaannnggnanaa

SEQ ID NO: 2 - DNA, 1200 bp, Homo Sapiens
  misc_feature (900)..(900): n is a, c, g, or t
  misc_feature (917)..(917): n is a, c, g, or t
  misc_feature (941)..(941): n is a, c, g, or t
  misc_feature (968)..(968): n is a, c, g, or t
  misc_feature (975)..(975): n is a, c, g, or t
  misc_feature (979)..(979): n is a, c, g, or t
  misc_feature (993)..(993): n is a, c, g, or t
  misc_feature (1006)..(1006): n is a, c, g, or t
  misc_feature (1009)..(1009): n is a, c, g, or t
  misc_feature (1019)..(1019): n is a, c, g, or t
  misc_feature (1027)..(1027): n is a, c, g, or t
  misc_feature (1030)..(1030): n is a, c, g, or t
  misc_feature (1034)..(1034): n is a, c, g, or t
  misc_feature (1036)..(1036): n is a, c, g, or t
  misc_feature (1044)..(1044): n is a, c, g, or t
  misc_feature (1048)..(1048): n is a, c, g, or t
  misc_feature (1055)..(1055): n is a, c, g, or t
  misc_feature (1063)..(1063): n is a, c, g, or t
  misc_feature (1080)..(1080): n is a, c, g, or t
  misc_feature (1082)..(1082): n is a, c, g, or t
  misc_feature (1088)..(1088): n is a, c, g, or t
  misc_feature (1111)..(1111): n is a, c, g, or t
  misc_feature (1128)..(1129): n is a, c, g, or t
  misc_feature (1136)..(1136): n is a, c, g, or t
  misc_feature (1148)..(1148): n is a, c, g, or t
  misc_feature (1162)..(1162): n is a, c, g, or t
  misc_feature (1165)..(1165): n is a, c, g, or t
  misc_feature (1182)..(1183): n is a, c, g, or t
  misc_feature (1190)..(1190): n is a, c, g, or t
  misc_feature (1195)..(1195): n is a, c, g, or t
gagaaaattactatgagaggatcgcatcaccatcaccatcacggatcctatttaggtgacactatagaatcgtcgacccacgcgtccggtgccctgaagggagctgtggatggaggcttgtctatccctcacagtaccaaacgattccctggttatgattctgaaagcaaggaatttaatgcagaagtacatcggaagcacatcatgggccagaatgttgcagattacatgcgctacttaatggaagaagatgaagatgcttacaagaaacagttctctcaatacataaagaacagcgtaactccagacatgatggaggagatgtataagaaagctcatgctgctatacgagagaatccagtctatgaaaagaagcccaagaaagaagttaaaaagaagaggtggaaccgtcccaaaatgtcccttgctcagaagaaggatcgggtagctcaaaagaaggcaagcttcctcagagctcaggagcgggctgctgagagctaaacccagcaattttctatgattttttcagatatagataataaacttatgaacagcaaaaaaaaaaaaaaagggcggccgctccctatagtgagtcgtattaagcttaattagctgagcttggactcctgttgatagatccagtaatgacctcagaactccatctggatttgttcagaacgctcggttgccgccgggcgttttttattggtgagaatccaagctagcttggcgagattttcaggagctaaggaagctaaaatggagaaaaaaatcactggatataccaccgttgatatatcccaatggcatcgtaaagaacattttgaggcatttcagtcagttgctcaatgtacctataaccagaccgttcagctggatattacggcctttttaaagacngtaaagaaaaataagcncaagttttttccggccttttttcncattcttgcccgcctgatgaatgctcntccgganttcntatggcaatgaaanacggtgagctggnganatgggatagngtcccccntgntacncngtttttcntgancaactgnaacgtttnctccctctggaggaatncnccgacnatttccggcgtttccacccattnttcccaaaatggggggnnttacggngaaacctggccnatttccctaagggnttnttggaaaatttttttcnnccccccnccccnggggg

SEQ ID NO: 3 - DNA, 738 bp, Homo Sapiens
  misc_feature (91)..(91): n is a, c, g, or t
  misc_feature (219)..(219): n is a, c, g, or t
  misc_feature (369)..(369): n is a, c, g, or t
  misc_feature (506)..(506): n is a, c, g, or t
  misc_feature (518)..(518): n is a, c, g, or t
  misc_feature (552)..(552): n is a, c, g, or t
  misc_feature (567)..(567): n is a, c, g, or t
  misc_feature (572)..(572): n is a, c, g, or t
  misc_feature (589)..(589): n is a, c, g, or t
  misc_feature (593)..(593): n is a, c, g, or t
  misc_feature (599)..(599): n is a, c, g, or t
  misc_feature (603)..(603): n is a, c, g, or t
  misc_feature (605)..(605): n is a, c, g, or t
  misc_feature (610)..(610): n is a, c, g, or t
  misc_feature (612)..(612): n is a, c, g, or t
  misc_feature (639)..(639): n is a, c, g, or t
  misc_feature (657)..(657): n is a, c, g, or t
  misc_feature (666)..(666): n is a, c, g, or t
  misc_feature (674)..(674): n is a, c, g, or t
  misc_feature (684)..(684): n is a, c, g, or t
  misc_feature (692)..(692): n is a, c, g, or t
  misc_feature (706)..(706): n is a, c, g, or t
  misc_feature (715)..(715): n is a, c, g, or t
  misc_feature (719)..(719): n is a, c, g, or t
  misc_feature (722)..(722): n is a, c, g, or t
tagagaaattactatgagaggatcgcatcaccatcaccatcacggatcctatttaggtgacactatagaatcgtcgacccacgcgtccggncggtccccgggcccactggcggctcctcgggtcgcttcctcagccccgagcagcacgcgtgcagctggcagctcctgctgcccgccccggaggccgcagcgggcagcgagctggcgctgcgctgccanagcccggacggggcgcgccaccagtgcgcctaccgcgggcatccggagcgctgcgcagcctacgccgctcgccgcgcgcacttctggaagcaggtgctgggagggctgcgcaagaagcggaggccctgtcacgaccccgcgccgctccangcccgcttgtgcgcgggcaagaagggccacggcgccgaactgcggctagtgccccgcgcgtccccgcccgcacgccccaccgtcgcgggattcgcgggggagtccaagccccgggcccggaaccgggggcggacccnggagcgtgcgtncggcccagccgctgggaccccgcctccccaaaancgcaccgcccaaaanaaaanccctcagagaagaagancaancgtggncaanangaaangnggccttggtcccccaacgaagaacganccatggggaccgggcccnaccccgacnggctggangggaacgcgnaactcacngaaaactacttgcnctgaaaaantggncantccctctgcaacttct

SEQ ID NO: 4 - DNA, 1466 bp, Homo Sapiens
  misc_feature (38)..(38): n is a, c, g, or t
  misc_feature (566)..(566): n is a, c, g, or t
  misc_feature (571)..(571): n is a, c, g, or t
  misc_feature (595)..(595): n is a, c, g, or t
  misc_feature (599)..(599): n is a, c, g, or t
  misc_feature (604)..(604): n is a, c, g, or t
  misc_feature (606)..(607): n is a, c, g, or t
  misc_feature (613)..(613): n is a, c, g, or t
  misc_feature (618)..(618): n is a, c, g, or t
  misc_feature (620)..(620): n is a, c, g, or t
  misc_feature (631)..(631): n is a, c, g, or t
  misc_feature (633)..(633): n is a, c, g, or t
  misc_feature (636)..(636): n is a, c, g, or t
  misc_feature (642)..(642): n is a, c, g, or t
  misc_feature (647)..(647): n is a, c, g, or t
  misc_feature (656)..(656): n is a, c, g, or t
  misc_feature (661)..(662): n is a, c, g, or t
  misc_feature (667)..(667): n is a, c, g, or t
  misc_feature (684)..(685): n is a, c, g, or t
  misc_feature (687)..(687): n is a, c, g, or t
  misc_feature (692)..(692): n is a, c, g, or t
  misc_feature (697)..(697): n is a, c, g, or t
  misc_feature (700)..(700): n is a, c, g, or t
  misc_feature (710)..(710): n is a, c, g, or t
  misc_feature (731)..(731): n is a, c, g, or t
  misc_feature (745)..(745): n is a, c, g, or t
  misc_feature (747)..(747): n is a, c, g, or t
  misc_feature (750)..(750): n is a, c, g, or t
  misc_feature (765)..(765): n is a, c, g, or t
  misc_feature (770)..(771): n is a, c, g, or t
  misc_feature (774)..(774): n is a, c, g, or t
  misc_feature (781)..(781): n is a, c, g, or t
  misc_feature (785)..(785): n is a, c, g, or t
  misc_feature (807)..(807): n is a, c, g, or t
  misc_feature (827)..(829): n is a, c, g, or t
  misc_feature (841)..(843): n is a, c, g, or t
  misc_feature (857)..(857): n is a, c, g, or t
  misc_feature (870)..(870): n is a, c, g, or t
  misc_feature (889)..(889): n is a, c, g, or t
  misc_feature (892)..(893): n is a, c, g, or t
  misc_feature (902)..(903): n is a, c, g, or t
  misc_feature (905)..(905): n is a, c, g, or t
  misc_feature (910)..(911): n is a, c, g, or t
  misc_feature (918)..(918): n is a, c, g, or t
  misc_feature (922)..(922): n is a, c, g, or t
  misc_feature (928)..(928): n is a, c, g, or t
  misc_feature (934)..(934): n is a, c, g, or t
  misc_feature (936)..(936): n is a, c, g, or t
  misc_feature (953)..(953): n is a, c, g, or t
  misc_feature (961)..(961): n is a, c, g, or t
  misc_feature (963)..(963): n is a, c, g, or t
  misc_feature (974)..(975): n is a, c, g, or t
  misc_feature (977)..(977): n is a, c, g, or t
  misc_feature (983)..(983): n is a, c, g, or t
  misc_feature (990)..(990): n is a, c, g, or t
  misc_feature (996)..(996): n is a, c, g, or t
  misc_feature (1007)..(1007): n is a, c, g, or t
  misc_feature (1021)..(1021): n is a, c, g, or t
  misc_feature (1024)..(1024): n is a, c, g, or t
  misc_feature (1031)..(1031): n is a, c, g, or t
  misc_feature (1033)..(1034): n is a, c, g, or t
  misc_feature (1042)..(1042): n is a, c, g, or t
  misc_feature (1050)..(1050): n is a, c, g, or t
  misc_feature (1057)..(1057): n is a, c, g, or t
  misc_feature (1072)..(1073): n is a, c, g, or t
  misc_feature (1078)..(1078): n is a, c, g, or t
  misc_feature (1080)..(1080): n is a, c, g, or t
  misc_feature (1084)..(1084): n is a, c, g, or t
  misc_feature (1087)..(1087): n is a, c, g, or t
  misc_feature (1103)..(1104): n is a, c, g, or t
  misc_feature (1108)..(1108): n is a, c, g, or t
  misc_feature (1113)..(1113): n is a, c, g, or t
  misc_feature (1126)..(1126): n is a, c, g, or t
  misc_feature (1130)..(1130): n is a, c, g, or t
  misc_feature (1135)..(1135): n is a, c, g, or t
  misc_feature (1137)..(1137): n is a, c, g, or t
  misc_feature (1140)..(1140): n is a, c, g, or t
  misc_feature (1142)..(1142): n is a, c, g, or t
  misc_feature (1147)..(1149): n is a, c, g, or t
  misc_feature (1156)..(1156): n is a, c, g, or t
  misc_feature (1160)..(1160): n is a, c, g, or t
  misc_feature (1163)..(1163): n is a, c, g, or t
  misc_feature (1165)..(1165): n is a, c, g, or t
  misc_feature (1167)..(1168): n is a, c, g, or t
  misc_feature (1170)..(1171): n is a, c, g, or t
  misc_feature (1178)..(1178): n is a, c, g, or t
  misc_feature (1180)..(1180): n is a, c, g, or t
  misc_feature (1184)..(1184): n is a, c, g, or t
  misc_feature (1187)..(1187): n is a, c, g, or t
  misc_feature (1195)..(1195): n is a, c, g, or t
  misc_feature (1198)..(1198): n is a, c, g, or t
  misc_feature (1200)..(1200): n is a, c, g, or t
  misc_feature (1204)..(1205): n is a, c, g, or t
  misc_feature (1209)..(1209): n is a, c, g, or t
  misc_feature (1214)..(1214): n is a, c, g, or t
  misc_feature (1254)..(1255): n is a, c, g, or t
  misc_feature (1258)..(1258): n is a, c, g, or t
  misc_feature (1268)..(1268): n is a, c, g, or t
  misc_feature (1274)..(1274): n is a, c, g, or t
  misc_feature (1282)..(1282): n is a, c, g, or t
  misc_feature (1289)..(1289): n is a, c, g, or t
  misc_feature (1291)..(1291): n is a, c, g, or t
  misc_feature (1293)..(1293): n is a, c, g, or t
  misc_feature (1302)..(1302): n is a, c, g, or t
  misc_feature (1314)..(1314): n is a, c, g, or t
  misc_feature (1317)..(1317): n is a, c, g, or t
  misc_feature (1320)..(1320): n is a, c, g, or t
  misc_feature (1323)..(1323): n is a, c, g, or t
  misc_feature (1330)..(1330): n is a, c, g, or t
  misc_feature (1332)..(1332): n is a, c, g, or t
  misc_feature (1336)..(1338): n is a, c, g, or t
  misc_feature (1342)..(1342): n is a, c, g, or t
  misc_feature (1346)..(1346): n is a, c, g, or t
  misc_feature (1349)..(1349): n is a, c, g, or t
  misc_feature (1351)..(1351): n is a, c, g, or t
  misc_feature (1356)..(1356): n is a, c, g, or t
  misc_feature (1360)..(1360): n is a, c, g, or t
  misc_feature (1364)..(1365): n is a, c, g, or t
  misc_feature (1369)..(1369): n is a, c, g, or t
  misc_feature (1371)..(1372): n is a, c, g, or t
  misc_feature (1374)..(1374): n is a, c, g, or t
  misc_feature (1382)..(1382): n is a, c, g, or t
  misc_feature (1385)..(1385): n is a, c, g, or t
  misc_feature (1389)..(1389): n is a, c, g, or t
  misc_feature (1391)..(1391): n is a, c, g, or t
  misc_feature (1401)..(1401): n is a, c, g, or t
  misc_feature (1408)..(1408): n is a, c, g, or t
  misc_feature (1414)..(1415): n is a, c, g, or t
  misc_feature (1424)..(1424): n is a, c, g, or t
  misc_feature (1426)..(1427): n is a, c, g, or t
  misc_feature (1437)..(1438): n is a, c, g, or t
  misc_feature (1442)..(1442): n is a, c, g, or t
  misc_feature (1453)..(1453): n is a, c, g, or t
  misc_feature (1457)..(1457): n is a, c, g, or t
agagagattactatgagaggatcgcatcaccatcaccntcacggatcctatttaggtgacactatagaatcgtcgacccacgcgtccgcccacgcgtccgcccacgcgtccgagaacccactgaaaaacttgagaatcatgttgaagctaaacccatatgcaaagaccatgcgccggaacaccattcttcgccaggccaggaatcacaagctccgggtggataaggcagctgctgcagcagcggcactacaagccaaatcagatgagaaggcggcggttgcaggcaagaagcctgtggtaggtaagaaaggaaagaaggctgctgttggtgttaagaagcagaagaagcctctggtgggaaaaaaggcagcagctaccaagaaaccagcccctgaaaagaagcctgcagagaagaaacctactacagaggagaagaagcctgctgcataaactcttaaatttgattattccataaaggtcaaatcattttggacagcttcttttgaataaagacctgattatacaggcagtgagaaaaaaaaaaaaaaaaaaaaaaaaaaaaaaanaaaanaaaaaaaaaaaaaaaaaaaaaaanaaanaaaangnntggggnggccncnccctatagggngncgnattaancttanttacctgancttgnnccccngttgataaatccagtanngncctcnaaacnccntctggatttnttcaaaaaccctcggttgccnccgggggttttttntnggngaaaatccaagctancttgnngantttttcngganctaaggaacccttaaaatgggnaaaaaaaatcccctgggatnnncccccctttgannnttcccaatgggcancctaaaaaaaacnttttgagggcattttccanccnntttgctcanngnacccnntaacccnaacngttccngttggnantttacggggcctttttnaaaaaccngnaaaaaaaaaannanccccangtttttnccggcnttttttcccantttttgcccccctnaanaaaggcncnntccggaanttcctaanggcaaanaaaaaccggggaccnnggggntntggnaanatggttcccccttttnncccnttttncctgaacaactgnaacntttcntnccntntggannnaaatccncaanaantncnngnnttttctncnattnttncccaaaanggngngttnngganaaccnggccatttccctaagggttttttaaaatatttttttcccnnccnccccgggganttcccnttttattnaagggcnanangaacttttncccctttccccnggnaanttnccagganangggnnncccnggantcntnctccnctgnggtnnccgncnnangtttaatnaanccgngnagggggggantttttgnttggcnnccgggggcntnnggaaaaaaanncaanactttttttgncacnccaaccccc

SEQ ID NO: 5 - DNA, 1200 bp, Homo Sapiens
  misc_feature (820)..(820): n is a, c, g, or t
  misc_feature (910)..(910): n is a, c, g, or t
  misc_feature (922)..(922): n is a, c, g, or t
  misc_feature (931)..(931): n is a, c, g, or t
  misc_feature (937)..(938): n is a, c, g, or t
  misc_feature (972)..(972): n is a, c, g, or t
  misc_feature (983)..(983): n is a, c, g, or t
  misc_feature (992)..(992): n is a, c, g, or t
  misc_feature (1002)..(1002): n is a, c, g, or t
  misc_feature (1007)..(1007): n is a, c, g, or t
  misc_feature (1018)..(1018): n is a, c, g, or t
  misc_feature (1024)..(1024): n is a, c, g, or t
  misc_feature (1037)..(1038): n is a, c, g, or t
  misc_feature (1041)..(1041): n is a, c, g, or t
  misc_feature (1044)..(1044): n is a, c, g, or t
  misc_feature (1046)..(1046): n is a, c, g, or t
  misc_feature (1056)..(1056): n is a, c, g, or t
  misc_feature (1063)..(1064): n is a, c, g, or t
  misc_feature (1069)..(1069): n is a, c, g, or t
  misc_feature (1071)..(1071): n is a, c, g, or t
  misc_feature (1080)..(1080): n is a, c, g, or t
  misc_feature (1083)..(1083): n is a, c, g, or t
  misc_feature (1089)..(1089): n is a, c, g, or t
  misc_feature (1091)..(1091): n is a, c, g, or t
  misc_feature (1094)..(1097): n is a, c, g, or t
  misc_feature (1100)..(1100): n is a, c, g, or t
  misc_feature (1103)..(1103): n is a, c, g, or t
  misc_feature (1108)..(1110): n is a, c, g, or t
  misc_feature (1117)..(1117): n is a, c, g, or t
  misc_feature (1126)..(1126): n is a, c, g, or t
  misc_feature (1141)..(1141): n is a, c, g, or t
  misc_feature (1147)..(1148): n is a, c, g, or t
  misc_feature (1150)..(1151): n is a, c, g, or t
  misc_feature (1157)..(1157): n is a, c, g, or t
  misc_feature (1165)..(1165): n is a, c, g, or t
  misc_feature (1167)..(1168): n is a, c, g, or t
  misc_feature (1170)..(1171): n is a, c, g, or t
  misc_feature (1173)..(1173): n is a, c, g, or t
  misc_feature (1176)..(1176): n is a, c, g, or t
  misc_feature (1181)..(1181): n is a, c, g, or t
  misc_feature (1184)..(1184): n is a, c, g, or t
  misc_feature (1189)..(1189): n is a, c, g, or t
  misc_feature (1191)..(1191): n is a, c, g, or t
  misc_feature (1194)..(1194): n is a, c, g, or t
tagagaaattactatgagaggatcgcatcaccatcaccatcacggatcctatttaggtgacactatagaatcgtcgacccacgcgtccgcccacgcgtccgccaaagccctggctatgaacctcggagccccgggtatgaaccccggagccctggctatgaatctgagagctctagatatgaatcccagaacactgagctcaaaacccaaagcccagaatttgaagctcaaagttccaaattccaggaaggtgcggagatgcttctgaaccccgaggaaaagagtcctttgaatatctccgtaggagttcaccccctggactccttcactcaggggtttggggagcagcccacaggggacctgcccatagggccaccttttgagatgcccacaggggccctgctgtctacaccgcagtttgagatgcttcagaatcccctgggtctcacaggagcccttcgaggtccaggtcggcggggtggccgggccaggggtgggcagggccctcggcctaacatctgcggcatctgcgggaagagcttcgggcggggctccaccctgatccagcaccagcgcatccacaccggtgagaagccctacaaatgtgaggtctgcagcaaggccttctcccagagctctgacctcatcaaacaccagcgcacccacactggcgagcggccctacaaatgtccccgttgcggcaaggccttcgccgacagctcttacctgcttcgccaccagcgcactcactctggccagaagccctacaagtgcccacattgtggcaaggccttcggcgacagctcctacctcctgcganaccagcgcacccacagccacgagcggccctacagctgcaccgagtgcggcaagtgctatagccagaaactcgtccctgcgcagccatcanagggtgcacacnggtcaaagncccttnnagctgtggcatctgcggcaaaagctttctcccancggtcggcccnttatccccnatgcccgcanccacncccgggaaaancccttncaagtgccctganntgnggnangcgctttggnccaaaanntgggngntgggcaatncangcccgnanccnnnntgncanggccnnncctaaangttgccccnaatgggggaaaaaantttaanngnntctcantttaatcnannannanggnttccnaanggggnanggncctaag

SEQ ID NO: 6 - DNA, 1368 bp, Homo Sapiens
  misc_feature (841)..(841): n is a, c, g, or t
  misc_feature (867)..(867): n is a, c, g, or t
  misc_feature (906)..(906): n is a, c, g, or t
  misc_feature (915)..(915): n is a, c, g, or t
  misc_feature (923)..(923): n is a, c, g, or t
  misc_feature (932)..(932): n is a, c, g, or t
  misc_feature (948)..(948): n is a, c, g, or t
  misc_feature (953)..(953): n is a, c, g, or t
  misc_feature (955)..(955): n is a, c, g, or t
  misc_feature (963)..(963): n is a, c, g, or t
  misc_feature (965)..(966): n is a, c, g, or t
  misc_feature (979)..(979): n is a, c, g, or t
  misc_feature (984)..(985): n is a, c, g, or t
  misc_feature (995)..(995): n is a, c, g, or t
  misc_feature (999)..(999): n is a, c, g, or t
  misc_feature (1006)..(1006): n is a, c, g, or t
  misc_feature (1016)..(1016): n is a, c, g, or t
  misc_feature (1022)..(1022): n is a, c, g, or t
  misc_feature (1047)..(1047): n is a, c, g, or t
  misc_feature (1052)..(1052): n is a, c, g, or t
  misc_feature (1073)..(1074): n is a, c, g, or t
  misc_feature (1082)..(1082): n is a, c, g, or t
  misc_feature (1084)..(1084): n is a, c, g, or t
  misc_feature (1108)..(1108): n is a, c, g, or t
  misc_feature (1114)..(1114): n is a, c, g, or t
  misc_feature (1116)..(1116): n is a, c, g, or t
  misc_feature (1123)..(1124): n is a, c, g, or t
  misc_feature (1126)..(1126): n is a, c, g, or t
  misc_feature (1130)..(1130): n is a, c, g, or t
  misc_feature (1140)..(1140): n is a, c, g, or t
  misc_feature (1147)..(1147): n is a, c, g, or t
  misc_feature (1149)..(1149): n is a, c, g, or t
  misc_feature (1158)..(1158): n is a, c, g, or t
  misc_feature (1160)..(1162): n is a, c, g, or t
  misc_feature (1173)..(1174): n is a, c, g, or t
  misc_feature (1177)..(1177): n is a, c, g, or t
  misc_feature (1179)..(1179): n is a, c, g, or t
  misc_feature (1182)..(1182): n is a, c, g, or t
  misc_feature (1194)..(1195): n is a, c, g, or t
  misc_feature (1201)..(1202): n is a, c, g, or t
  misc_feature (1204)..(1204): n is a, c, g, or t
  misc_feature (1207)..(1207): n is a, c, g, or t
  misc_feature (1210)..(1211): n is a, c, g, or t
  misc_feature (1218)..(1218): n is a, c, g, or t
  misc_feature (1222)..(1222): n is a, c, g, or t
  misc_feature (1230)..(1230): n is a, c, g, or t
  misc_feature (1232)..(1232): n is a, c, g, or t
  misc_feature (1238)..(1238): n is a, c, g, or t
  misc_feature (1242)..(1242): n is a, c, g, or t
  misc_feature (1254)..(1254): n is a, c, g, or t
  misc_feature (1258)..(1258): n is a, c, g, or t
  misc_feature (1266)..(1266): n is a, c, g, or t
  misc_feature (1271)..(1271): n is a, c, g, or t
  misc_feature (1277)..(1278): n is a, c, g, or t
  misc_feature (1282)..(1283): n is a, c, g, or t
  misc_feature (1286)..(1286): n is a, c, g, or t
  misc_feature (1294)..(1294): n is a, c, g, or t
  misc_feature (1304)..(1305): n is a, c, g, or t
  misc_feature (1329)..(1329): n is a, c, g, or t
  misc_feature (1331)..(1331): n is a, c, g, or t
  misc_feature (1336)..(1337): n is a, c, g, or t
  misc_feature (1343)..(1343): n is a, c, g, or t
  misc_feature (1347)..(1347): n is a, c, g, or t
  misc_feature (1351)..(1353): n is a, c, g, or t
  misc_feature (1358)..(1358): n is a, c, g, or t
  misc_feature (1360)..(1362): n is a, c, g, or t
  misc_feature (1364)..(1364): n is a, c, g, or t
  misc_feature (1366)..(1366): n is a, c, g, or t
tagagaaattactatgagaggatcgcatcaccatcaccatcacggatcctatttaggtgacactatagaatcgtcgacccacgcgtccgtggaggtcctggcggcagagaccacgtcccagcaggagcggctgcaggccatcgcagagaagcggaagcggcaggcggagatcgagaacaagcgccggcagctggaggacgagcggaggcagctgcagcacctgaagtccaaggcactgcgggagcgctggctgctggaggggacgccgtcctcggcctcagagggggatgaggacctgaggaggcagatgcaggacgacgagcagaagacacggctgctggaggactcggtgtccaggttggagaaggaaattgaggtgctggagcgtggagactccgccccagccactgccaaggagaacgcggcggccccgagcccagtccgggccccagccccgagtccagccaaggaggagcgcaagacagaggtggtgatgaattcacagcagacgccggtgggcacgcccaaagacaagcgagtctccaacacgcccctgaggacggttgacggctcccccatgatgaaggcagtggtccatgctgtggacggcaccgccgagaacgggatccaccccctgagctcctccgaggtggacgaactcatccacaaagcggacgaggtcacgctgagcgaggcagggtccacggccggggcggcagagacccggggggctgtggagggggcagcccggaccacgccctcccggcgggagatcaccggtgtgcaggcacagccaggcgaggccacgtccggcccgccggggatccagcccggccaggancccccggtcacaatgatcttcatggnttaccaaaacgtggaggatgaaggcccaaaaccaaaaangtgctgggncctttaanataccatcncggcggaacttggtgntcatncnaaaaaccngnntgaacccaaggancctgnnccaacccaangggnagtgctngccgagcctnccacgnaaggccccctccaggaaaaaaaatnaaggnggggccccgaagcccccaccnnggaccccnanaacttaaattaaaaaacccccttnaaatgntnccccctnntngaanccggcccccnaaacccngnccccccccnannnaaaaaaacccnnaancnggncctccgggcctnncccccnncnccnaanntttgggnccanaattgggntnttaaantttntcaaattttttnccgnaaaaaaanggggncccccnnttcnnccnaaattccncaaaaaaaanntttttttttttaaaaaaaaaaaancnttttnnaaaaancccntttnnnttttnannngntncc

SEQ ID NO: 7 - DNA, 423 bp, Homo Sapiens
  misc_feature (115)..(116): n is a, c, g, or t
attagagatattactatgagaggatcgcatcaccatcaccatcacggatcctatttaggtgacactatagaatcgtcgacccacgcgtccgggcagcaggcgcagcccagcctcnnaatgcagaacgacgccggcgagttcgtggacctgtacgtgccgcggaaatgctccgctagcaatcgcatcatcggtgccaaggaccacgcatccatccagatgaacgtggccgaggttgacaaggtcacaggcaggtttaatggccagtttaaaacttatgctatctgcggggccattcgtaggatgggtgagtcagatgattccattctccgattggccaaggccgatggcatcgtctcaaagaacttttgactggagagaatcacagatgtggaatatttgtcataaataaataatgaaaaccta

SEQ ID NO: 8 - DNA, 1295 bp, Homo Sapiens
  misc_feature (624)..(624): n is a, c, g, or t
  misc_feature (688)..(688): n is a, c, g, or t
  misc_feature (693)..(693): n is a, c, g, or t
  misc_feature (718)..(718): n is a, c, g, or t
  misc_feature (723)..(724): n is a, c, g, or t
  misc_feature (728)..(728): n is a, c, g, or t
  misc_feature (731)..(731): n is a, c, g, or t
  misc_feature (734)..(734): n is a, c, g, or t
  misc_feature (742)..(742): n is a, c, g, or t
  misc_feature (749)..(749): n is a, c, g, or t
  misc_feature (755)..(755): n is a, c, g, or t
  misc_feature (767)..(767): n is a, c, g, or t
  misc_feature (779)..(779): n is a, c, g, or t
  misc_feature (787)..(787): n is a, c, g, or t
  misc_feature (794)..(794): n is a, c, g, or t
  misc_feature (796)..(796): n is a, c, g, or t
  misc_feature (798)..(798): n is a, c, g, or t
  misc_feature (801)..(802): n is a, c, g, or t
  misc_feature (804)..(804): n is a, c, g, or t
  misc_feature (806)..(807): n is a, c, g, or t
  misc_feature (810)..(811): n is a, c, g, or t
  misc_feature (818)..(818): n is a, c, g, or t
  misc_feature (824)..(824): n is a, c, g, or t
  misc_feature (826)..(826): n is a, c, g, or t
  misc_feature (828)..(829): n is a, c, g, or t
  misc_feature (835)..(835): n is a, c, g, or t
  misc_feature (838)..(838): n is a, c, g, or t
  misc_feature (847)..(847): n is a, c, g, or t
  misc_feature (849)..(849): n is a, c, g, or t
  misc_feature (868)..(869): n is a, c, g, or t
  misc_feature (872)..(872): n is a, c, g, or t
  misc_feature (878)..(878): n is a, c, g, or t
  misc_feature (880)..(880): n is a, c, g, or t
  misc_feature (882)..(882): n is a, c, g, or t
  misc_feature (884)..(884): n is a, c, g, or t
  misc_feature (891)..(891): n is a, c, g, or t
  misc_feature (895)..(895): n is a, c, g, or t
  misc_feature (902)..(905): n is a, c, g, or t
  misc_feature (909)..(909): n is a, c, g, or t
  misc_feature (913)..(914): n is a, c, g, or t
  misc_feature (916)..(916): n is a, c, g, or t
  misc_feature (919)..(919): n is a, c, g, or t
  misc_feature (921)..(923): n is a, c, g, or t
  misc_feature (925)..(926): n is a, c, g, or t
  misc_feature (928)..(930): n is a, c, g, or t
  misc_feature (935)..(935): n is a, c, g, or t
  misc_feature (938)..(945): n is a, c, g, or t
  misc_feature (947)..(948): n is a, c, g, or t
  misc_feature (951)..(955): n is a, c, g, or t
  misc_feature (957)..(960): n is a, c, g, or t
  misc_feature (962)..(962): n is a, c, g, or t
  misc_feature (964)..(968): n is a, c, g, or t
  misc_feature (971)..(972): n is a, c, g, or t
  misc_feature (974)..(974): n is a, c, g, or t
  misc_feature (976)..(979): n is a, c, g, or t
  misc_feature (981)..(982): n is a, c, g, or t
  misc_feature (984)..(986): n is a, c, g, or t
  misc_feature (988)..(990): n is a, c, g, or t
  misc_feature (993)..(995): n is a, c, g, or t
  misc_feature (997)..(1001): n is a, c, g, or t
  misc_feature (1006)..(1007): n is a, c, g, or t
  misc_feature (1009)..(1009): n is a, c, g, or t
  misc_feature (1012)..(1012): n is a, c, g, or t
  misc_feature (1017)..(1017): n is a, c, g, or t
  misc_feature (1019)..(1025): n is a, c, g, or t
  misc_feature (1028)..(1033): n is a, c, g, or t
  misc_feature (1037)..(1044): n is a, c, g, or t
  misc_feature (1047)..(1047): n is a, c, g, or t
  misc_feature (1049)..(1050): n is a, c, g, or t
  misc_feature (1052)..(1065): n is a, c, g, or t
  misc_feature (1068)..(1070): n is a, c, g, or t
  misc_feature (1074)..(1075): n is a, c, g, or t
  misc_feature (1077)..(1080): n is a, c, g, or t
  misc_feature (1082)..(1084): n is a, c, g, or t
  misc_feature (1086)..(1113): n is a, c, g, or t
  misc_feature (1115)..(1119): n is a, c, g, or t
  misc_feature (1122)..(1144): n is a, c, g, or t
  misc_feature (1149)..(1273): n is a, c, g, or t
  misc_feature (1275)..(1282): n is a, c, g, or t
  misc_feature (1284)..(1295): n is a, c, g, or t
aaattagagaaattactatgagaggatcgcatcaccatcaccatcacggatcctatttaggtgacactatagaatcgtcgacccacgcgtccgcccacgcgtccgctccagaccacagaaggggagtcctggggacaggactggtgtagacaggcatctccaccgccccggttagccagtacctaacacccactcctgccctcggccgatgtggcaaaccggggaggcttttgtgtggggccggggctgcggccatggcagccaccctccagctcccgggggctggggaagacgctggggtccccgtggaggctggagcggcgttcaggtcctgcggtcactcggcgtgctcctgcacctcttccccacgcagggcctgcagccggctgcccacagtctgctgcacggcctccagcccctctgcatccagctcccgcagcagcagcaggatggcagtcaggacgttctgagggcagaggggtgcggactaagcccacccggcacagcgaggctgcttccctccacaagggctggggcctggccagcggtgccccaccacggagcgactggtcccgggggtgtgggccgtccaagtgactgaccggcacactcggagaatctgancagaggagccccgcctgtggacgcgtgtgtggcacctcttccacgtgactcctgttgccctcancccancagggcccgggcccacattccacanaccannacancanganaggctgangggccangacggntccgtgcggggnacgtgttacacntgtgtgcncattcanananccnnananncannttccccntggggnananntctttnaangcctgtgangnttccatgctccctccccannggnccctgntnangnttcatgntccntccccannnntttntgtnnantgntnnnanngnnnaaaanaannnnnnnncnntannnnncnnnnantnnnnntgnncngnnnntnntnnnannnatnnntnnnnnaaaannanaanaaaantnnnnnnnaannnnnntttnnnnnnnnttntnntnnnnnnnnnnnnnnaannnaaannannnntnnnannnnnnnnnnnnnnnnnnnnnnnnnnnntnnnnnaannnnnnnnnnnnnnnnnnnnnnnaaaannnnnnnnnnnnnnnnnnnnnnnnnnnnnnnnnnnnnnnnnnnnnnnnnnnnnnnnnnnnnnnnnnnnnnnnnnnnnnnnnnnnnnnnnnnnnnnnnnnnnnnnnnnnnnnnnnnnnnnnnnnnnannnnnnnntnnnnnnnnnnnn

SEQ ID NO: 9 - DNA, 1200 bp, Homo Sapiens
  misc_feature (854)..(854): n is a, c, g, or t
  misc_feature (890)..(890): n is a, c, g, or t
  misc_feature (900)..(900): n is a, c, g, or t
  misc_feature (918)..(918): n is a, c, g, or t
  misc_feature (941)..(941): n is a, c, g, or t
  misc_feature (944)..(944): n is a, c, g, or t
  misc_feature (955)..(955): n is a, c, g, or t
  misc_feature (960)..(960): n is a, c, g, or t
  misc_feature (968)..(968): n is a, c, g, or t
  misc_feature (971)..(971): n is a, c, g, or t
  misc_feature (976)..(976): n is a, c, g, or t
  misc_feature (978)..(978): n is a, c, g, or t
  misc_feature (990)..(990): n is a, c, g, or t
  misc_feature (996)..(996): n is a, c, g, or t
  misc_feature (1003)..(1003): n is a, c, g, or t
  misc_feature (1005)..(1005): n is a, c, g, or t
  misc_feature (1023)..(1023): n is a, c, g, or t
  misc_feature (1027)..(1027): n is a, c, g, or t
  misc_feature (1033)..(1033): n is a, c, g, or t
  misc_feature (1037)..(1037): n is a, c, g, or t
  misc_feature (1042)..(1042): n is a, c, g, or t
  misc_feature (1054)..(1054): n is a, c, g, or t
  misc_feature (1057)..(1057): n is a, c, g, or t
  misc_feature (1059)..(1059): n is a, c, g, or t
  misc_feature (1065)..(1065): n is a, c, g, or t
  misc_feature (1072)..(1072): n is a, c, g, or t
  misc_feature (1076)..(1076): n is a, c, g, or t
  misc_feature (1079)..(1079): n is a, c, g, or t
  misc_feature (1090)..(1090): n is a, c, g, or t
  misc_feature (1092)..(1092): n is a, c, g, or t
  misc_feature (1096)..(1097): n is a, c, g, or t
  misc_feature (1103)..(1103): n is a, c, g, or t
  misc_feature (1107)..(1107): n is a, c, g, or t
  misc_feature (1114)..(1115): n is a, c, g, or t
  misc_feature (1117)..(1117): n is a, c, g, or t
  misc_feature (1124)..(1124): n is a, c, g, or t
  misc_feature (1139)..(1139): n is a, c, g, or t
  misc_feature (1142)..(1142): n is a, c, g, or t
  misc_feature (1151)..(1152): n is a, c, g, or t
  misc_feature (1154)..(1154): n is a, c, g, or t
  misc_feature (1170)..(1171): n is a, c, g, or t
  misc_feature (1177)..(1177): n is a, c, g, or t
  misc_feature (1179)..(1179): n is a, c, g, or t
  misc_feature (1181)..(1181): n is a, c, g, or t
  misc_feature (1186)..(1188): n is a, c, g, or t
  misc_feature (1192)..(1192): n is a, c, g, or t
  misc_feature (1194)..(1195): n is a, c, g, or t
  misc_feature (1198)..(1200): n is a, c, g, or t
agaaattactatgagaggatcgcatcaccatcaccatcacggatcctatttaggtgacactatagaatcgtcgacccacgcgtccggacggagcgcccccgcccccgcccggccgcccgcccgccgccgccatgcccttctccaacagccacaacgcactgaagctgcgcttcccggccgaggacgagttccccgacctgagcgcccacaacaaccacatggccaaggtgctgacccccgagctgtacgcggagctgcgcgccaagagcacgccgagcggcttcacgctggacgacgtcatccagacaggcgtggacaacccgggccacccgtacatcatgaccgtgggctgcgtggcgggcgacgaggagtcctacgaagtgttcaaggatctcttcgaccccatcatcgaggaccggcacggcggctacaagcccagcgatgagcacaagaccgacctcaaccccgacaacctgcagggcggcgacgacctggaccccaactacgtgctgagctcgcgggtgcgcacgggccgcagcatccgtggcttctgcctccccccgcactgcagccgcggggagcgccgagccatcgagaagctcgcggtggaagccctgtccagcctggacggcgacctggcgggccgatactacgcgctcaagagcatgacggaggcggagcagcagcagctcatcgacgaccacttcctcttcgacaagcccgtgtcgcccctgctgctggcctcgggcatggcccgcgactggcccgacgcccgcggtatctggcacaatgacaataagaccttcctggtgtgggtcaacgaggaggaccacctgcgggtcatctccatgcanaaggggggcaacatgaaggaggtgttcacccgcttntgcaccggcntcacccaaattgaaactnttttcaagtctaaggactatganttnatgtggaaccntcacntgggctanatncttcncntgcccatccaanctgggnacggggntncgggcaggtgtgcatatnaagntgcccnaacntgggnaagcatgaaaanttntngaaggngcttaancggntgnaattttaaaancnaggnnaaaggngggngggaaanngnttgcggngggggggggtttttnaanttttcaaanntnaacgcttgggtttttnnaaaagngnanttggnnnaaangnnggnnn

SEQ ID NO: 10 - DNA, 1373 bp, Homo Sapiens
  misc_feature (855)..(855): n is a, c, g, or t
  misc_feature (972)..(972): n is a, c, g, or t
  misc_feature (996)..(996): n is a, c, g, or t
  misc_feature (998)..(998): n is a, c, g, or t
  misc_feature (1016)..(1016): n is a, c, g, or t
  misc_feature (1022)..(1022): n is a, c, g, or t
  misc_feature (1024)..(1024): n is a, c, g, or t
  misc_feature (1027)..(1027): n is a, c, g, or t
  misc_feature (1037)..(1037): n is a, c, g, or t
  misc_feature (1063)..(1063): n is a, c, g, or t
  misc_feature (1084)..(1084): n is a, c, g, or t
  misc_feature (1087)..(1087): n is a, c, g, or t
  misc_feature (1094)..(1094): n is a, c, g, or t
  misc_feature (1100)..(1100): n is a, c, g, or t
  misc_feature (1126)..(1126): n is a, c, g, or t
  misc_feature (1128)..(1128): n is a, c, g, or t
  misc_feature (1133)..(1133): n is a, c, g, or t
  misc_feature (1136)..(1136): n is a, c, g, or t
  misc_feature (1142)..(1143): n is a, c, g, or t
  misc_feature (1148)..(1148): n is a, c, g, or t
  misc_feature (1156)..(1156): n is a, c, g, or t
  misc_feature (1162)..(1162): n is a, c, g, or t
  misc_feature (1167)..(1167): n is a, c, g, or t
  misc_feature (1175)..(1175): n is a, c, g, or t
  misc_feature (1179)..(1179): n is a, c, g, or t
  misc_feature (1183)..(1183): n is a, c, g, or t
  misc_feature (1185)..(1186): n is a, c, g, or t
  misc_feature (1189)..(1190): n is a, c, g, or t
  misc_feature (1193)..(1193): n is a, c, g, or t
  misc_feature (1195)..(1195): n is a, c, g, or t
  misc_feature (1198)..(1198): n is a, c, g, or t
  misc_feature (1200)..(1200): n is a, c, g, or t
  misc_feature (1203)..(1203): n is a, c, g, or t
  misc_feature (1212)..(1213): n is a, c, g, or t
  misc_feature (1219)..(1219): n is a, c, g, or t
  misc_feature (1243)..(1243): n is a, c, g, or t
  misc_feature (1245)..(1245): n is a, c, g, or t
  misc_feature (1252)..(1252): n is a, c, g, or t
  misc_feature (1258)..(1258): n is a, c, g, or t
  misc_feature (1262)..(1262): n is a, c, g, or t
  misc_feature (1267)..(1267): n is a, c, g, or t
  misc_feature (1274)..(1274): n is a, c, g, or t
  misc_feature (1277)..(1277): n is a, c, g, or t
  misc_feature (1285)..(1285): n is a, c, g, or t
  misc_feature (1290)..(1290): n is a, c, g, or t
  misc_feature (1295)..(1295): n is a, c, g, or t
  misc_feature (1304)..(1304): n is a, c, g, or t
  misc_feature (1310)..(1310): n is a, c, g, or t
  misc_feature (1315)..(1315): n is a, c, g, or t
  misc_feature (1327)..(1327): n is a, c, g, or t
  misc_feature (1338)..(1338): n is a, c, g, or t
  misc_feature (1344)..(1344): n is a, c, g, or t
  misc_feature (1347)..(1349): n is a, c, g, or t
  misc_feature (1352)..(1352): n is a, c, g, or t
  misc_feature (1360)..(1360): n is a, c, g, or t
  misc_feature (1372)..(1372): n is a, c, g, or t
agagaaattactatgagaggatcgcatcaccatcaccatcacggatcctatttaggtgacactatagaatcgtcgacccacgcgtccgtgaaagccacagatcaggaaaagagcagaaaactacatgaacttacggttatgcaagatagacgagaacaagcaagacaagacttgaagggtttggaagagacagtggcaaaagaacttcagactttacacaacctgcgcaaactctttgttcaggacctggctacaagagttaaaaagagtgctgagattgattctgatgacaccggaggcagcgctgctcagaagcaaaaaatctcctttcttgaaaataatcttgaacagctcactaaagtgcacaaacagttggtacgtgataatgcagatctccgctgtgaacttcctaagttggaaaagcgacttcgagctacagctgagagagtgaaagctttggaatcagcactgaaagaagctaaagaaaatgcatctcgtgatcgcaaacgctatcagcaagaagtagatcgcataaaggaagcagtcaggtcaaagaatatggccagaagagggcattctgcacagattgctaaacctattcgtcccgggcaacatccagcagcttctccaactcacccaagtgcaattcgtggaggaggtgcatttgttcagaacagccagccagtggcagtgcgaggtggaggaggcaaacaagtgtaatcgtttatacatacccacaggtgttaaaaagtaatcgaagtacgaagaggacatggtatcaagcagtcattcaatgactataacctctactcccttgggattgtagaattataacttttaaaaaaaatgtataanttatacctggcctgtacagctgtttcctacctactcttcttgtaaactctgctgcttcccaacacaactagagtgcattttggcatcttaggagggaaaaggacagtttacaactgnggccctatttattacccagtttgncnatcgggcctaaatttagncttacngngcnagctactgtncctaaaggacggacttttggattttngggaggttatttttaaccccnttnaataccnaccgcnaaaaaaaaaaaaaaaaaaaaaggggncnccccntanggggcnnataanctattacngactgncccgntgaaaccnaagncccnannccnnggntntcnanccngtgcccggnntttttngggaacccccctgggattttggcngnccaaggnaaaacnggtncccgntttccgnccnaaattggntttcntcctnctaaccccncgtttnttttnaaaaaaaaattnctttccccccncccccnttnnnggngggggtcncccccccccccnc

SEQ ID NO: 11 - DNA, 1330 bp, Homo Sapiens
  misc_feature (4)..(4): n is a, c, g, or t
  misc_feature (748)..(748): n is a, c, g, or t
  misc_feature (795)..(795): n is a, c, g, or t
  misc_feature (805)..(805): n is a, c, g, or t
  misc_feature (837)..(837): n is a, c, g, or t
  misc_feature (865)..(865): n is a, c, g, or t
  misc_feature (869)..(869): n is a, c, g, or t
  misc_feature (873)..(873): n is a, c, g, or t
  misc_feature (876)..(876): n is a, c, g, or t
  misc_feature (878)..(878): n is a, c, g, or t
  misc_feature (881)..(881): n is a, c, g, or t
  misc_feature (890)..(893): n is a, c, g, or t
  misc_feature (897)..(897): n is a, c, g, or t
  misc_feature (900)..(900): n is a, c, g, or t
  misc_feature (909)..(909): n is a, c, g, or t
  misc_feature (911)..(911): n is a, c, g, or t
  misc_feature (920)..(920): n is a, c, g, or t
  misc_feature (926)..(926): n is a, c, g, or t
  misc_feature (931)..(932): n is a, c, g, or t
  misc_feature (935)..(935): n is a, c, g, or t
  misc_feature (940)..(940): n is a, c, g, or t
  misc_feature (942)..(946): n is a, c, g, or t
  misc_feature (949)..(949): n is a, c, g, or t
  misc_feature (952)..(953): n is a, c, g, or t
  misc_feature (956)..(956): n is a, c, g, or t
  misc_feature (959)..(959): n is a, c, g, or t
  misc_feature (965)..(967): n is a, c, g, or t
  misc_feature (971)..(971): n is a, c, g, or t
  misc_feature (974)..(974): n is a, c, g, or t
  misc_feature (976)..(979): n is a, c, g, or t
  misc_feature (981)..(981): n is a, c, g, or t
  misc_feature (989)..(989): n is a, c, g, or t
  misc_feature (994)..(995): n is a, c, g, or t
  misc_feature (997)..(1001): n is a, c, g, or t
  misc_feature (1003)..(1006): n is a, c, g, or t
  misc_feature (1010)..(1100): n is a, c, g, or t
  misc_feature (1102)..(1102): n is a, c, g, or t
  misc_feature (1104)..(1107): n is a, c, g, or t
  misc_feature (1109)..(1109): n is a, c, g, or t
  misc_feature (1113)..(1121): n is a, c, g, or t
  misc_feature (1123)..(1131): n is a, c, g, or t
  misc_feature (1133)..(1135): n is a, c, g, or t
  misc_feature (1137)..(1154): n is a, c, g, or t
  misc_feature (1156)..(1159): n is a, c, g, or t
  misc_feature (1161)..(1166): n is a, c, g, or t
  misc_feature (1172)..(1174): n is a, c, g, or t
  misc_feature (1176)..(1195): n is a, c, g, or t
  misc_feature (1204)..(1208): n is a, c, g, or t
  misc_feature (1210)..(1219): n is a, c, g, or t
  misc_feature (1222)..(1227): n is a, c, g, or t
  misc_feature (1232)..(1253): n is a, c, g, or t
  misc_feature (1256)..(1272): n is a, c, g, or t
  misc_feature (1276)..(1289): n is a, c, g, or t
  misc_feature (1292)..(1295): n is a, c, g, or t
  misc_feature (1299)..(1304): n is a, c, g, or t
  misc_feature (1306)..(1330): n is a, c, g, or t
aaanttagagaaattactatgagaggatcgcatcaccatcaccatcacggatcctatttaggtgacactatagaatcgtcgacccacgcgtccgccggagcccttgagcgcgaggcgcggagcccccggagcccccaaaccgcagacacatccccgcgccccagagccccggcctgcgcgcccagccgggcccgcgcgatgccctcagaccggcctttcaagcagcggcggagcttcgccgaccgctgtaaggaggtacagcagatccgcgaccagcaccccagcaaaatcccggtgatcatcgagcgctacaagggtgagaagcagctgcccgtcctggacaagaccaagtttttggtcccggaccatgtcaacatgagcgagttggtcaagatcatccggcgccgcctgcagctgaaccccacgcaggccttcttcctgctggtgaaccagcacagcatggtgagtgtgtccacgcccatcgcggacatctacgagcaggagaaagacgaggacggcttcctctatatggtctacgcctcccaggaaaccttcggcttctgagccagcagtaggggggctcggcctgggagtcggggggccccggtcaggccctgcccagagagctcctggttcctgaactgagctgcctctaccgtggtgggctgggcaggcatgtgcccccctagtcagagggcaccaacccacctactctgcccctgggtggatcctgggccggtcgtgttanggttgtccctctgggtgctggctggtgggatgggggagggtggggancaactcccancacccctgctgtgtggttcatcttttttttangcccctgcctgtctgcccatctgccccntcanccanccnanggntctgcccannnnctgnacntgcccaccntnaaaaatggncctggntcccnnccnttgtntnnnnntgntgnnggnatntggggnnnttgnccntnnnnanaaaaaaanaattnntnnnnntnnnntggnnnnnnnnnnnnnnnnnnnnnnnnnnnnnnnnnnnnnnnnnnnnnnnnnnnnnnnnnnnnnnnnnnnnnnnnnnnnnnnnnnnnnnnnnnnanannnntnattnnnnnnnnntnnnnnnnnntnnnannnnnnnnnnnnnnnnnnannnntnnnnnntttttnnnannnnnnnnnnnnnnnnnnnnttttttttnnnnnannnnnnnnnnttnnnnnnttttnnnnnnnnnnnnnnnnnnnnnnaannnnnnnnnnnnnnnnnattnnnnnnnnnnnnnnaannnntttnnnnnntnnnnnnnnnnnnnnnnnnnnnnnnn

SEQ ID NO: 12 - DNA, 882 bp, Homo Sapiens
  misc_feature (5)..(5): n is a, c, g, or t
  misc_feature (817)..(817): n is a, c, g, or t
  misc_feature (863)..(863): n is a, c, g, or t
  misc_feature (865)..(865): n is a, c, g, or t
  misc_feature (877)..(877): n is a, c, g, or t
gaatngagaaattactatgagaggatcgcatcaccatcaccatcacggatcctatttaggtgacactatagaatcgtcgacccacgcgtccgcgggagcggagagcggaccccagagagccctgagcagccccaccgccgccgccggcctagttaccatcacaccccgggaggagccgcagctgccgcagccggccccagtcaccatcaccgcaaccatgagcagcgaggccgagacccagcagccgcccgccgccccccccgccgcccccgccctcagcgccgccgacaccaagcccggcactacgggcagcggcgcagggagcggtggcccgggcggcctcacatcggcggcgcctgccggcggggacaagaaggtcatcgcaacgaaggttttgggaacagtaaaatggttcaatgtaaggaacggatatggtttcatcaacaggaatgacaccaaggaagatgtatttgtacaccagactgccataaagaagaataaccccaggaagtaccttcgcagtgtaggagatggagagactgtggagtttgatgttgttgaaggagaaaagggtgcggaggcagcaaatgttacaggtcctggtggtgttccagttcaaggcagtaaatatgcagcagaccgtaaccattatagacgctatccacgtcgtaggggtcctccacgcaattaccagcaaaattaccagaatagtgagagtggggaaaaagaacgagggatcggagagtgctcccgaaggccaggcccaacaacgccggccctaccgcaggcgaaggttcccaccttactacatgcgganaccctatgggcgtcgaaccacagtattccaaccctcctgtgcaggnanaaattgatgganggtgc

SEQ ID NO: 13 - DNA, 1200 bp, Homo Sapiens
  misc_feature (422)..(422): n is a, c, g, or t
  misc_feature (444)..(444): n is a, c, g, or t
  misc_feature (543)..(543): n is a, c, g, or t
  misc_feature (569)..(570): n is a, c, g, or t
  misc_feature (581)..(582): n is a, c, g, or t
  misc_feature (586)..(586): n is a, c, g, or t
  misc_feature (596)..(596): n is a, c, g, or t
  misc_feature (599)..(600): n is a, c, g, or t
  misc_feature (602)..(603): n is a, c, g, or t
  misc_feature (610)..(610): n is a, c, g, or t
  misc_feature (613)..(613): n is a, c, g, or t
  misc_feature (616)..(616): n is a, c, g, or t
  misc_feature (627)..(627): n is a, c, g, or t
  misc_feature (631)..(631): n is a, c, g, or t
  misc_feature (634)..(634): n is a, c, g, or t
  misc_feature (636)..(636): n is a, c, g, or t
  misc_feature (641)..(641): n is a, c, g, or t
  misc_feature (646)..(646): n is a, c, g, or t
  misc_feature (650)..(650): n is a, c, g, or t
  misc_feature (653)..(653): n is a, c, g, or t
  misc_feature (655)..(656): n is a, c, g, or t
  misc_feature (660)..(660): n is a, c, g, or t
  misc_feature (662)..(662): n is a, c, g, or t
  misc_feature (667)..(669): n is a, c, g, or t
  misc_feature (674)..(676): n is a, c, g, or t
  misc_feature (683)..(684): n is a, c, g, or t
  misc_feature (686)..(686): n is a, c, g, or t
  misc_feature (700)..(700): n is a, c, g, or t
  misc_feature (702)..(703): n is a, c, g, or t
  misc_feature (709)..(709): n is a, c, g, or t
  misc_feature (713)..(713): n is a, c, g, or t
  misc_feature (715)..(715): n is a, c, g, or t
  misc_feature (717)..(717): n is a, c, g, or t
  misc_feature (724)..(724): n is a, c, g, or t
  misc_feature (726)..(727): n is a, c, g, or t
  misc_feature (734)..(735): n is a, c, g, or t
  misc_feature (737)..(737): n is a, c, g, or t
  misc_feature (742)..(742): n is a, c, g, or t
  misc_feature (747)..(747): n is a, c, g, or t
  misc_feature (750)..(752): n is a, c, g, or t
  misc_feature (756)..(756): n is a, c, g, or t
  misc_feature (759)..(759): n is a, c, g, or t
  misc_feature (761)..(761): n is a, c, g, or t
  misc_feature (763)..(763): n is a, c, g, or t
  misc_feature (766)..(767): n is a, c, g, or t
  misc_feature (780)..(780): n is a, c, g, or t
  misc_feature (783)..(784): n is a, c, g, or t
  misc_feature (786)..(786): n is a, c, g, or t
  misc_feature (788)..(789): n is a, c, g, or t
  misc_feature (791)..(792): n is a, c, g, or t
  misc_feature (796)..(796): n is a, c, g, or t
  misc_feature (799)..(800): n is a, c, g, or t
  misc_feature (803)..(803): n is a, c, g, or t
  misc_feature (805)..(805): n is a, c, g, or t
  misc_feature (807)..(810): n is a, c, g, or t
  misc_feature (813)..(813): n is a, c, g, or t
  misc_feature (815)..(815): n is a, c, g, or t
  misc_feature (817)..(817): n is a, c, g, or t
  misc_feature (822)..(822): n is a, c, g, or t
  misc_feature (824)..(824): n is a, c, g, or t
  misc_feature (832)..(832): n is a, c, g, or t
  misc_feature (834)..(834): n is a, c, g, or t
  misc_feature (836)..(836): n is a, c, g, or t
  misc_feature (842)..(842): n is a, c, g, or t
  misc_feature (844)..(844): n is a, c, g, or t
  misc_feature (849)..(849): n is a, c, g, or t
  misc_feature (851)..(853): n is a, c, g, or t
  misc_feature (855)..(855): n is a, c, g, or t
  misc_feature (862)..(863): n is a, c, g, or t
  misc_feature (869)..(871): n is a, c, g, or t
  misc_feature (878)..(879): n is a, c, g, or t
  misc_feature (881)..(881): n is a, c, g, or t
  misc_feature (883)..(883): n is a, c, g, or t
  misc_feature (887)..(887): n is a, c, g, or t
  misc_feature (890)..(890): n is a, c, g, or t
  misc_feature (894)..(894): n is a, c, g, or t
  misc_feature (900)..(900): n is a, c, g, or t
  misc_feature (904)..(910): n is a, c, g, or t
  misc_feature (912)..(912): n is a, c, g, or t
  misc_feature (914)..(914): n is a, c, g, or t
  misc_feature (919)..(919): n is a, c, g, or t
  misc_feature (923)..(924): n is a, c, g, or t
  misc_feature (927)..(929): n is a, c, g, or t
  misc_feature (938)..(939): n is a, c, g, or t
  misc_feature (941)..(944): n is a, c, g, or t
  misc_feature (946)..(948): n is a, c, g, or t
  misc_feature (950)..(950): n is a, c, g, or t
  misc_feature (954)..(954): n is a, c, g, or t
  misc_feature (958)..(959): n is a, c, g, or t
  misc_feature (961)..(961): n is a, c, g, or t
  misc_feature (966)..(969): n is a, c, g, or t
  misc_feature (979)..(981): n is a, c, g, or t
  misc_feature (984)..(984): n is a, c, g, or t
  misc_feature (987)..(987): n is a, c, g, or t
  misc_feature (989)..(989): n is a, c, g, or t
  misc_feature (991)..(992): n is a, c, g, or t
  misc_feature (995)..(995): n is a, c, g, or t
  misc_feature (998)..(998): n is a, c, g, or t
  misc_feature (1000)..(1003): n is a, c, g, or t
  misc_feature (1009)..(1009): n is a, c, g, or t
  misc_feature (1013)..(1013): n is a, c, g, or t
  misc_feature (1016)..(1016): n is a, c, g, or t
  misc_feature (1024)..(1026): n is a, c, g, or t
  misc_feature (1028)..(1028): n is a, c, g, or t
  misc_feature (1032)..(1032): n is a, c, g, or t
  misc_feature (1037)..(1037): n is a, c, g, or t
  misc_feature (1040)..(1040): n is a, c, g, or t
  misc_feature (1047)..(1047): n is a, c, g, or t
  misc_feature (1053)..(1053): n is a, c, g, or t
  misc_feature (1065)..(1065): n is a, c, g, or t
  misc_feature (1068)..(1071): n is a, c, g, or t
  misc_feature (1080)..(1080): n is a, c, g, or t
  misc_feature (1082)..(1082): n is a, c, g, or t
  misc_feature (1085)..(1086): n is a, c, g, or t
  misc_feature (1088)..(1089): n is a, c, g, or t
  misc_feature (1093)..(1093): n is a, c, g, or t
  misc_feature (1095)..(1095): n is a, c, g, or t
  misc_feature (1102)..(1102): n is a, c, g, or t
  misc_feature (1109)..(1109): n is a, c, g, or t
  misc_feature (1111)..(1112): n is a, c, g, or t
  misc_feature (1117)..(1118): n is a, c, g, or t
  misc_feature (1122)..(1122): n is a, c, g, or t
  misc_feature (1124)..(1124): n is a, c, g, or t
  misc_feature (1126)..(1126): n is a, c, g, or t
  misc_feature (1130)..(1130): n is a, c, g, or t
  misc_feature (1132)..(1133): n is a, c, g, or t
  misc_feature (1136)..(1136): n is a, c, g, or t
  misc_feature (1138)..(1138): n is a, c, g, or t
  misc_feature (1140)..(1144): n is a, c, g, or t
  misc_feature (1149)..(1150): n is a, c, g, or t
  misc_feature (1160)..(1160): n is a, c, g, or t
  misc_feature (1172)..(1172): n is a, c, g, or t
  misc_feature (1174)..(1174): n is a, c, g, or t
  misc_feature (1178)..(1180): n is a, c, g, or t
  misc_feature (1186)..(1186): n is a, c, g, or t
  misc_feature (1191)..(1192): n is a, c, g, or t
  misc_feature (1194)..(1195): n is a, c, g, or t
  misc_feature (1197)..(1197): n is a, c, g, or t
  misc_feature (1199)..(1199): n is a, c, g, or t
catatagagaaattactatgagaggatcgcatcaccatcaccatcacggatcctatttaggtgacactatagaatcgtcgacccacgcgtccgcccacgcgtccgccaggattccctcagtaacggcgagtgaacagggaagagcccagcgccgaatccccgccccgcggcggggcgcgggacatgtggcgtacggaagacccgctccccggcgccgctcgtggggggcccaagtccttctgatcgaggcccagcccgtggacggtgtgaggccggtagcggcccccggcgcgccgggcccgggtcttcccggagtcgggttgcttgggaatgcagcccaaagcgggtggtaaactccatctaaggctaaataccggcacgagaccgatagtcaacaagtaccgtaagggaaagttgaaaanaactttgaagagagagttcaanagggcgtgaaaccgttaagaggtaaacgggtggggtccgcgcattccgcccggaggattcaacccggcggctgggtccggccgtgtcggcggcccggcngatctttcccgccccccgttcctccnnatacatccacnngccntccctttccnccnncnncccttcntcntcntctctggaggntgangtntncctgntattngcgnttntnnatgnantttgnnntgaannntaacaanngntaaactgttccttntnnttattncggntntngaacaantnnatttttnntntctgncattnttnnnctgnttntntnccnnactttttttttanagnncnanntnngaantannaantntnnnntgncntnttctntnattttttntnancaacancncattnannnancaatatnnataatnnnttttttnnananaaantcntctntttctnaaannnnnnnantnttttntttnnttnnnatttttttnncnnnntnnntntttnaatnncntaatnnnntatttaattnnnttnatnantnnatnttntnnnnaaatanattnttntaatatannntnaaanatacntantattttntttttnaaataattttcnatnnnnatttcaatntnttnntnntttntnttaatanttttttntnnttttnnaatntntnttanannatncntnnnnnttttnntttaaaaaanaatttttttttntnaatnnntttttnaaaanntnntnant

SEQ ID NO: 14 - DNA, 1000 bp, Homo Sapiens
  misc_feature (876)..(876): n is a, c, g, or t
  misc_feature (881)..(881): n is a, c, g, or t
  misc_feature (892)..(892): n is a, c, g, or t
  misc_feature (944)..(944): n is a, c, g, or t
  misc_feature (962)..(962): n is a, c, g, or t
  misc_feature (974)..(974): n is a, c, g, or t
caatagagaaattactatgagaggatcgcatcaccatcaccatcacggatcctatttaggtgacactatagaatcgtcgacccacgcgtccggccccttggagagagaggctgcctcagccagtggcacaggagactccaaggagctactgacattcctaagagtggaggaggaggaggagccttgctgggccagggaaacaaagtttacattgtcctgtagctttaaaaccacagctgggcagggtgagaagctagatgcccctgcagtttggccctggagccagggcagaggaatgtagggcctgcatggagaagggttctgccctgcctgaggaggaggacacagcacaagggcacattgcccatggctgggaacatgacccagcctgaaagatacaggggatcatgttaaaaatagcagtattatttttcgtctcaatggtattgtaactaagttatttactcctcctgctcctcacccctgtagggaaaccttggagaggagagtggcaggtgggctgcctgctgtgttaagaggacttagtttgtgatgtaaggcactgtcaggaatggggggcgggccagggtgggaagagaagaaatagcagagcctattttggtgaggttttttgtttttaagtcaaagaagactcagtatgctttccctgaggaatgaaaaagggattgaggagttgcctgactcctgggtgggtggggtacaggcagttaggtgctgaatgaagctgccatccttgctgcagcttctaactggtaaaaagatccagggatggagatgggaaggttagaaaggcagccctcacctctgaagacagaggccggggtccaggcccgtgggcgcaaaggtgcctcatancatanccagcattcancacacacaaacctactgcccacatttgggcctcagggttggccatttgctanttctgctgccctcttaanatctgactgccnaaataaatcatcctcatgtcaaaaac

SEQ ID NO: 15 - DNA, 1350 bp, Homo Sapiens
  misc_feature (691)..(691): n is a, c, g, or t
  misc_feature (696)..(696): n is a, c, g, or t
  misc_feature (741)..(741): n is a, c, g, or t
  misc_feature (748)..(748): n is a, c, g, or t
  misc_feature (767)..(767): n is a, c, g, or t
  misc_feature (815)..(815): n is a, c, g, or t
  misc_feature (822)..(822): n is a, c, g, or t
  misc_feature (828)..(828): n is a, c, g, or t
  misc_feature (834)..(834): n is a, c, g, or t
  misc_feature (869)..(869): n is a, c, g, or t
  misc_feature (873)..(873): n is a, c, g, or t
  misc_feature (880)..(880): n is a, c, g, or t
  misc_feature (888)..(888): n is a, c, g, or t
  misc_feature (923)..(923): n is a, c, g, or t
  misc_feature (926)..(926): n is a, c, g, or t
  misc_feature (936)..(937): n is a, c, g, or t
  misc_feature (949)..(949): n is a, c, g, or t
  misc_feature (955)..(956): n is a, c, g, or t
  misc_feature (967)..(967): n is a, c, g, or t
  misc_feature (978)..(978): n is a, c, g, or t
  misc_feature (999)..(999): n is a, c, g, or t
  misc_feature (1002)..(1002): n is a, c, g, or t
  misc_feature (1004)..(1011): n is a, c, g, or t
  misc_feature (1013)..(1020): n is a, c, g, or t
  misc_feature (1022)..(1024): n is a, c, g, or t
  misc_feature (1026)..(1027): n is a, c, g, or t
  misc_feature (1029)..(1029): n is a, c, g, or t
  misc_feature (1031)..(1031): n is a, c, g, or t
  misc_feature (1033)..(1042): n is a, c, g, or t
  misc_feature (1051)..(1051): n is a, c, g, or t
  misc_feature (1053)..(1053): n is a, c, g, or t
  misc_feature (1061)..(1061): n is a, c, g, or t
  misc_feature (1065)..(1065): n is a, c, g, or t
  misc_feature (1070)..(1070): n is a, c, g, or t
  misc_feature (1073)..(1073): n is a, c, g, or t
  misc_feature (1075)..(1075): n is a, c, g, or t
  misc_feature (1080)..(1081): n is a, c, g, or t
  misc_feature (1086)..(1086): n is a, c, g, or t
  misc_feature (1088)..(1088): n is a, c, g, or t
  misc_feature (1093)..(1093): n is a, c, g, or t
  misc_feature (1096)..(1096): n is a, c, g, or t
  misc_feature (1110)..(1110): n is a, c, g, or t
  misc_feature (1120)..(1120): n is a, c, g, or t
  misc_feature (1125)..(1125): n is a, c, g, or t
  misc_feature (1140)..(1141): n is a, c, g, or t
  misc_feature (1158)..(1158): n is a, c, g, or t
  misc_feature (1161)..(1162): n is a, c, g, or t
  misc_feature (1186)..(1187): n is a, c, g, or t
  misc_feature (1194)..(1194): n is a, c, g, or t
  misc_feature (1197)..(1197): n is a, c, g, or t
  misc_feature (1200)..(1200): n is a, c, g, or t
  misc_feature (1206)..(1206): n is a, c, g, or t
  misc_feature (1223)..(1225): n is a, c, g, or t
  misc_feature (1227)..(1227): n is a, c, g, or t
  misc_feature (1232)..(1233): n is a, c, g, or t
  misc_feature (1236)..(1236): n is a, c, g, or t
  misc_feature (1243)..(1245): n is a, c, g, or t
  misc_feature (1247)..(1247): n is a, c, g, or t
  misc_feature (1250)..(1250): n is a, c, g, or t
  misc_feature (1254)..(1254): n is a, c, g, or t
  misc_feature (1257)..(1258): n is a, c, g, or t
  misc_feature (1265)..(1267): n is a, c, g, or t
  misc_feature (1271)..(1271): n is a, c, g, or t
  misc_feature (1274)..(1274): n is a, c, g, or t
  misc_feature (1286)..(1286): n is a, c, g, or t
  misc_feature (1295)..(1298): n is a, c, g, or t
  misc_feature (1300)..(1302): n is a, c, g, or t
  misc_feature (1306)..(1306): n is a, c, g, or t
  misc_feature (1318)..(1319): n is a, c, g, or t
  misc_feature (1321)..(1322): n is a, c, g, or t
  misc_feature (1330)..(1330): n is a, c, g, or t
  misc_feature (1334)..(1334): n is a, c, g, or t
tagagaaattactatgagaggatcgcatcaccatcaccatcacggatcctatttaggtgacactatagaatcgtcgacccacgcgtccggcgaagaaccagccacatccccctggcctgctgagcagtccccaaaatcacgcacgtccgaggagatgggggctggagcccccatgcgggagcctgggagcccagctgaatccgagggccgggaccaggcccagccgtccccggtaacccagcctggcgcctcggcctaggggaggggtgagacgctcgctgccgtgcccgccacaccaagatgttggggctgcctggcgcccactggagacagacagacagacgcctgtcccccgggaccgaggcctgtgccgtccccacccgccccaacatggtgctcatccttgccgagacccctgcagtccgtgcccgcgcccagcccagctgccccggctgcacgcctgctgctcccagctcgcccggctgccacaagctctctgcgggtccatcctccccgcaggaggaggggtccgtcctcgcaggccctgcccggcctctctgcagaccctcaagcgtcgtctgcatgagtgagcaggcgtgggtggactctggccgcggccacacttggtgctcaccagctgcttcggccttcaggtgacctccctccccacggcatcctgctctccgggtgnaagancagctttctgtctcccagaaggcatcgcttttccctcttgagcanatcggancccctgggaagtttggaanctgcctccaagcctaggacacggaacggtggccggggcggcctctggnccctgangctggntgaaanaggccgtggggcgggttttggggcgtgaacaaagntggnaataaantggaaaancttgctcccctggttaaggccctggccctgccctnaancaaaaagtgnnttgggccatgcntgcaannttccttcccanttttaaaaaantggtcccaaactttttaaaanaanannnnnnnnannnnnnnntnnnannananannnnnnnnnnggggggggncncctccctnaaangaagntcnantaaannttaantnattanaantttgaaatcttttnaaaaaattcnaaaangacctcaaaaatccnntgtaatttttttaaaanttnnttttcccccgggggtttttttttnnggaaaancanacntttttnggaaatttttgggtttnnnanttaannggnaaaaaannngnganaacnccnntaaattnnngggnttnaaaaaaattttngggtttttnnnntnnnaggnaaaaaaaaaaanntnnggaaattnactnttttaaaaaaaaaaaa

SEQ ID NO: 16 - DNA, 1200 bp, Homo Sapiens
  misc_feature (684)..(684): n is a, c, g, or t
  misc_feature (785)..(785): n is a, c, g, or t
  misc_feature (835)..(835): n is a, c, g, or t
  misc_feature (878)..(878): n is a, c, g, or t
  misc_feature (880)..(880): n is a, c, g, or t
  misc_feature (892)..(892): n is a, c, g, or t
  misc_feature (905)..(906): n is a, c, g, or t
  misc_feature (912)..(912): n is a, c, g, or t
  misc_feature (914)..(914): n is a, c, g, or t
  misc_feature (917)..(917): n is a, c, g, or t
  misc_feature (924)..(924): n is a, c, g, or t
  misc_feature (935)..(935): n is a, c, g, or t
  misc_feature (948)..(948): n is a, c, g, or t
  misc_feature (950)..(950): n is a, c, g, or t
  misc_feature (971)..(971): n is a, c, g, or t
  misc_feature (973)..(973): n is a, c, g, or t
  misc_feature (998)..(998): n is a, c, g, or t
  misc_feature (1004)..(1004): n is a, c, g, or t
  misc_feature (1013)..(1013): n is a, c, g, or t
  misc_feature (1015)..(1015): n is a, c, g, or t
  misc_feature (1020)..(1020): n is a, c, g, or t
  misc_feature (1042)..(1042): n is a, c, g, or t
  misc_feature (1047)..(1047): n is a, c, g, or t
  misc_feature (1056)..(1056): n is a, c, g, or t
  misc_feature (1060)..(1060): n is a, c, g, or t
  misc_feature (1072)..(1072): n is a, c, g, or t
  misc_feature (1096)..(1096): n is a, c, g, or t
  misc_feature (1109)..(1109): n is a, c, g, or t
  misc_feature (1111)..(1111): n is a, c, g, or t
  misc_feature (1120)..(1120): n is a, c, g, or t
  misc_feature (1123)..(1123): n is a, c, g, or t
  misc_feature (1132)..(1132): n is a, c, g, or t
  misc_feature (1137)..(1137): n is a, c, g, or t
  misc_feature (1145)..(1145): n is a, c, g, or t
  misc_feature (1169)..(1169): n is a, c, g, or t
  misc_feature (1171)..(1171): n is a, c, g, or t
  misc_feature (1176)..(1177): n is a, c, g, or t
  misc_feature (1194)..(1194): n is a, c, g, or t
  misc_feature (1196)..(1196): n is a, c, g, or t
  misc_feature (1198)..(1198): n is a, c, g, or t
  misc_feature (1200)..(1200): n is a, c, g, or t
aatagagaaattactatgagaggatcgcatcaccatcaccatcacggatcctatttaggtgacactatagaatcgtcgacccacgcgtccgacaacatcgtcactaaaactgacacaaatccttctgaaagcactcctgtttcctgctatccatgtaaccgagtgaaaactgattctgtggacctgaaatccccgtttggaagtccttctgctgaagctgtgtcctctcggctctcatggcctaaccattattcaggagcatcagaaagccagaccaggagtgacttcctgctggatccaagcaggagttatagttaccctagacaaaagacgccaggcacaccaaagagaaactgcccagcaccttttgattttgatggctgtgagctcctggccagccccactagcccagtcactgcagaattcagtagcagcgtctctggttgtcccaagtcagccagctactctctggagagcacagatgtgaaatctcttgcagctggtgtgacaaagcagagtacgtcatgccctgccttaccccccagggctccaaaactagtggaagagaaggtcgcctccgaaacatctcctttgcctctgaaaattgatggtgctgaggaagaccccaagtctgggtcaccagatctctcggaggaccagtattttgttaaaaagggcatgcangacatcttctctgcctcctaccctttctcatctccgctccatctccagctggcccccagatcctgtggcgacggttccccatggcagccacctgctgaccntatcaggactctctatagaggaagtgtccaagtcactacggttcattggnttgtccgaaagatgtcatatcatttctttgttactgaaaaaantngatggggaaccntgctttgtttcannctaacngnaanaaaatcnttctccaaagnatttcaaattgancnaaattgccagggtgaaaaaananaatggcaaattcattaaatgggctnggaggncccaaaaananaaccnaaataaaccccccgggccagcnttggnaaaaaaacngaantcaatggcgtgntgccaaaaaaggggggggctgggnaaaccaattttcntnttttttccnctnaaaaacttnttctngtaaaaangggaaaaaaaaaactcttaatatncnaaatnntttttttaaaggggaanangntn

SEQ ID NO: 17 - DNA, 961 bp, Homo Sapiens
gaattaactatgagaggtcgcatcaccatcaccatcacggatcctatttaggtgacactatagaatcgtcgacccacgcgtccggcggaggtgcaggtcgaagaggccgggctacgtcgtgccctgcgcgtgagcagctgcagcggcagaggcagcatccagcggcggcgccagcagttccagtccgttgctttactttttgcttcaccgacatagtcattatgccgaagagaaagtctccagagaatacagagggcaaagatggatccaaagtaactaaacaggagcccacaagacggtctgccagattgtcagcgaaacctgctccaccaaaacctgaacccaaaccaagaaaaacatctgctaagaaagaacctggagcaaagattagcagaggtgctaaagggaagaaggaggaaaagcaggaagctggaaaggaaggtactgcaccatctgaaaatggtgaaactaaagctgaagaggcacagaaaactgaatctgtagataacgagggagaatgattgtcatgaaaaattggggttgattttatgtatctcttgggacaacttttaaaagctatttttaccaagtattttgtaaatgctaattttttaggactctactagttggcatacgaaaatatataaggatggacattttatcgtctcatagtcatgctttttggaaatttacatcatcctcaagtaaaataaatatcagttaaatattggaagctgtgtgtaagattgattcagcattccatgcacttgctttaaaatttagtcctgtgcatactgtggtgtttttactgtgcatatttgaatttttcatgcagtttttctagagcaataatcagtggtgcttttgtacctaggttttatgtgattttaatgaaacatggatagttgtggccacctgctgactatttgtggtttaaataaaggtttacttctctgcggaa

SEQ ID NO: 18 - DNA, 1444 bp, Homo Sapiens
  misc_feature (720)..(720): n is a, c, g, or t
  misc_feature (751)..(751): n is a, c, g, or t
  misc_feature (755)..(755): n is a, c, g, or t
  misc_feature (766)..(766): n is a, c, g, or t
  misc_feature (827)..(827): n is a, c, g, or t
  misc_feature (829)..(829): n is a, c, g, or t
  misc_feature (836)..(836): n is a, c, g, or t
  misc_feature (852)..(852): n is a, c, g, or t
  misc_feature (861)..(861): n is a, c, g, or t
  misc_feature (865)..(865): n is a, c, g, or t
  misc_feature (867)..(867): n is a, c, g, or t
  misc_feature (891)..(891): n is a, c, g, or t
  misc_feature (897)..(897): n is a, c, g, or t
  misc_feature (910)..(910): n is a, c, g, or t
  misc_feature (914)..(914): n is a, c, g, or t
  misc_feature (921)..(921): n is a, c, g, or t
  misc_feature (925)..(925): n is a, c, g, or t
  misc_feature (945)..(945): n is a, c, g, or t
  misc_feature (961)..(961): n is a, c, g, or t
  misc_feature (963)..(963): n is a, c, g, or t
  misc_feature (974)..(974): n is a, c, g, or t
  misc_feature (976)..(976): n is a, c, g, or t
  misc_feature (980)..(980): n is a, c, g, or t
  misc_feature (984)..(984): n is a, c, g, or t
  misc_feature (986)..(986): n is a, c, g, or t
  misc_feature (994)..(994): n is a, c, g, or t
  misc_feature (999)..(999): n is a, c, g, or t
  misc_feature (1004)..(1004): n is a, c, g, or t
  misc_feature (1007)..(1007): n is a, c, g, or t
  misc_feature (1011)..(1012): n is a, c, g, or t
  misc_feature (1023)..(1023): n is a, c, g, or t
  misc_feature (1029)..(1029): n is a, c, g, or t
  misc_feature (1036)..(1037): n is a, c, g, or t
  misc_feature (1048)..(1048): n is a, c, g, or t
  misc_feature (1052)..(1052): n is a, c, g, or t
  misc_feature (1057)..(1057): n is a, c, g, or t
  misc_feature (1061)..(1061): n is a, c, g, or t
  misc_feature (1073)..(1074): n is a, c, g, or t
  misc_feature (1082)..(1082): n is a, c, g, or t
  misc_feature (1085)..(1085): n is a, c, g, or t
  misc_feature (1087)..(1088): n is a, c, g, or t
  misc_feature (1090)..(1091): n is a, c, g, or t
  misc_feature (1093)..(1093): n is a, c, g, or t
  misc_feature (1097)..(1097): n is a, c, g, or t
  misc_feature (1102)..(1102): n is a, c, g, or t
  misc_feature (1113)..(1113): n is a, c, g, or t
  misc_feature (1117)..(1118): n is a, c, g, or t
  misc_feature (1121)..(1121): n is a, c, g, or t
  misc_feature (1126)..(1126): n is a, c, g, or t
  misc_feature (1129)..(1130): n is a, c, g, or t
  misc_feature (1137)..(1137): n is a, c, g, or t
  misc_feature (1139)..(1139): n is a, c, g, or t
  misc_feature (1144)..(1144): n is a, c, g, or t
  misc_feature (1147)..(1147): n is a, c, g, or t
  misc_feature (1150)..(1151): n is a, c, g, or t
  misc_feature (1153)..(1153): n is a, c, g, or t
  misc_feature (1159)..(1159): n is a, c, g, or t
  misc_feature (1163)..(1163): n is a, c, g, or t
  misc_feature (1168)..(1169): n is a, c, g, or t
  misc_feature (1172)..(1172): n is a, c, g, or t
  misc_feature (1174)..(1175): n is a, c, g, or t
  misc_feature (1183)..(1184): n is a, c, g, or t
  misc_feature (1192)..(1192): n is a, c, g, or t
  misc_feature (1195)..(1195): n is a, c, g, or t
  misc_feature (1206)..(1206): n is a, c, g, or t
  misc_feature (1209)..(1209): n is a, c, g, or t
  misc_feature (1212)..(1212): n is a, c, g, or t
  misc_feature (1215)..(1215): n is a, c, g, or t
  misc_feature (1222)..(1222): n is a, c, g, or t
  misc_feature (1224)..(1224): n is a, c, g, or t
  misc_feature (1226)..(1226): n is a, c, g, or t
  misc_feature (1228)..(1228): n is a, c, g, or t
  misc_feature (1236)..(1237): n is a, c, g, or t
  misc_feature (1242)..(1243): n is a, c, g, or t
  misc_feature (1250)..(1250): n is a, c, g, or t
  misc_feature (1259)..(1259): n is a, c, g, or t
  misc_feature (1264)..(1265): n is a, c, g, or t
  misc_feature (1267)..(1267): n is a, c, g, or t
  misc_feature (1270)..(1270): n is a, c, g, or t
  misc_feature (1273)..(1273): n is a, c, g, or t
  misc_feature (1278)..(1279): n is a, c, g, or t
  misc_feature (1281)..(1281): n is a, c, g, or t
  misc_feature (1284)..(1284): n is a, c, g, or t
  misc_feature (1288)..(1289): n is a, c, g, or t
  misc_feature (1308)..(1308): n is a, c, g, or t
  misc_feature (1316)..(1317): n is a, c, g, or t
  misc_feature (1320)..(1320): n is a, c, g, or t
  misc_feature (1328)..(1328): n is a, c, g, or t
  misc_feature (1331)..(1331): n is a, c, g, or t
  misc_feature (1333)..(1333): n is a, c, g, or t
  misc_feature (1339)..(1339): n is a, c, g, or t
  misc_feature (1343)..(1343): n is a, c, g, or t
  misc_feature (1347)..(1347): n is a, c, g, or t
  misc_feature (1358)..(1361): n is a, c, g, or t
  misc_feature (1366)..(1366): n is a, c, g, or t
  misc_feature (1369)..(1370): n is a, c, g, or t
  misc_feature (1376)..(1376): n is a, c, g, or t
  misc_feature (1379)..(1379): n is a, c, g, or t
  misc_feature (1382)..(1382): n is a, c, g, or t
  misc_feature (1391)..(1395): n is a, c, g, or t
  misc_feature (1397)..(1398): n is a, c, g, or t
  misc_feature (1400)..(1403): n is a, c, g, or t
  misc_feature (1406)..(1406): n is a, c, g, or t
  misc_feature (1408)..(1409): n is a, c, g, or t
  misc_feature (1413)..(1413): n is a, c, g, or t
  misc_feature (1416)..(1416): n is a, c, g, or t
  misc_feature (1421)..(1421): n is a, c, g, or t
  misc_feature (1425)..(1425): n is a, c, g, or t
  misc_feature (1430)..(1430): n is a, c, g, or t
  misc_feature (1434)..(1435): n is a, c, g, or t
  misc_feature (1439)..(1439): n is a, c, g, or t
  misc_feature (1443)..(1443): n is a, c, g, or t
gaatagagagattactatgagaggatcgcatcaccatcaccatcacggatcctatttaggtgacactatagaatcgtcgacccacgcgtccgcaggcatcacccctagcagcagcagcaggacccggacacctgcctctatcaatgctaccccagccaacatcaaccttgcagatctgacacgggctgtgaatgccctgcctcagaacatgacttcacagatgttcagtgccattgctgcggtgacaggccaaggacagaaccctaatgccaccccagcccagtgggcctccagccagtacggctatggcggcagtggaggcggcagcagtgcttaccacgtattcccaacgccagcccagcagccagtggccacaccactaatgacccctagctactcctacacgaccccaagccagcccatcaccacccctcagtaccaccagctccaggccagcaccaccccacagtcggcccaggcccagccccagccctcttccagctcccggcaacggcagcagcagccaaagtccaacagccatgcagccatcgactggggaaaaatggcggagcagtggctgcaggaaaaggaggcagaacggcggaaacagaagcagcggctgacacctcggccctcccccagccccatgatcgaaagcacccccatgtccattgctggcgatgccaccccactcctggacgagatggatcggtagggggnctgctcctcggactctggttacctctgaggntggnaaaaggcctgnctgcccactgcctccctccctgcccctccttttatgtccataaaagtggcgtgaaagtganangttctcntttggtggtcaaccgngatggggtnaaangnttggatggccttgtgaaacttgancttcanttgtatgctaggnaaanattcttnccgntcaaaccctccccgaaccanttgttcctggaaaccntnttggaaagggnantgtnggcnangaaggaanaaaanaaagntgnaaannaataaaaaaantttttnaatttcnnctccctaaaanccanttttnaaanttctgccctccnncggaattnttngnntnntnaatnggggnaccaaatttanaaannganttttnctnntttttgngngaaangantgnntntttttntttnggggnngangnnaaaaaaannaaaatttnttnaccctgattcnaanccnggnggttttncnantnggtttcanngaaannggaaacnttccacccnttagnngntcnttnccccnntntgnacanntttgttgtttttaataaangttttttnnaanaaaaatanaananaaaatnttantttntataaaaattnnnnccctntanntaaatnatnaantaaactaannnnnannannnntantnntaanacntcatntttntattntaanntaanattna

SEQ ID NO: 19 - DNA, 1408 bp, Homo Sapiens
  misc_feature (860)..(860): n is a, c, g, or t
  misc_feature (873)..(873): n is a, c, g, or t
  misc_feature (895)..(895): n is a, c, g, or t
  misc_feature (903)..(903): n is a, c, g, or t
  misc_feature (942)..(942): n is a, c, g, or t
  misc_feature (988)..(988): n is a, c, g, or t
  misc_feature (1011)..(1011): n is a, c, g, or t
  misc_feature (1020)..(1020): n is a, c, g, or t
  misc_feature (1025)..(1025): n is a, c, g, or t
  misc_feature (1027)..(1027): n is a, c, g, or t
  misc_feature (1034)..(1034): n is a, c, g, or t
  misc_feature (1038)..(1038): n is a, c, g, or t
  misc_feature (1070)..(1070): n is a, c, g, or t
  misc_feature (1076)..(1076): n is a, c, g, or t
  misc_feature (1089)..(1089): n is a, c, g, or t
  misc_feature (1105)..(1105): n is a, c, g, or t
  misc_feature (1110)..(1110): n is a, c, g, or t
  misc_feature (1132)..(1132): n is a, c, g, or t
  misc_feature (1154)..(1154): n is a, c, g, or t
  misc_feature (1161)..(1162): n is a, c, g, or t
  misc_feature (1165)..(1165): n is a, c, g, or t
  misc_feature (1170)..(1170): n is a, c, g, or t
  misc_feature (1185)..(1186): n is a, c, g, or t
  misc_feature (1209)..(1209): n is a, c, g, or t
  misc_feature (1215)..(1215): n is a, c, g, or t
  misc_feature (1220)..(1220): n is a, c, g, or t
  misc_feature (1247)..(1247): n is a, c, g, or t
  misc_feature (1253)..(1253): n is a, c, g, or t
  misc_feature (1257)..(1257): n is a, c, g, or t
  misc_feature (1271)..(1271): n is a, c, g, or t
  misc_feature (1276)..(1276): n is a, c, g, or t
  misc_feature (1278)..(1278): n is a, c, g, or t
  misc_feature (1287)..(1287): n is a, c, g, or t
  misc_feature (1290)..(1290): n is a, c, g, or t
  misc_feature (1292)..(1292): n is a, c, g, or t
  misc_feature (1294)..(1294): n is a, c, g, or t
  misc_feature (1296)..(1298): n is a, c, g, or t
  misc_feature (1300)..(1303): n is a, c, g, or t
  misc_feature (1310)..(1310): n is a, c, g, or t
  misc_feature (1313)..(1315): n is a, c, g, or t
  misc_feature (1318)..(1319): n is a, c, g, or t
  misc_feature (1325)..(1325): n is a, c, g, or t
  misc_feature (1328)..(1328): n is a, c, g, or t
  misc_feature (1335)..(1335): n is a, c, g, or t
  misc_feature (1349)..(1350): n is a, c, g, or t
  misc_feature (1354)..(1354): n is a, c, g, or t
  misc_feature (1358)..(1358): n is a, c, g, or t
  misc_feature (1360)..(1360): n is a, c, g, or t
  misc_feature (1364)..(1364): n is a, c, g, or t
  misc_feature (1367)..(1367): n is a, c, g, or t
  misc_feature (1370)..(1370): n is a, c, g, or t
  misc_feature (1373)..(1373): n is a, c, g, or t
  misc_feature (1388)..(1388): n is a, c, g, or t
  misc_feature (1390)..(1390): n is a, c, g, or t
  misc_feature (1399)..(1400): n is a, c, g, or t
ttagagagaattactatgagaggatcgcatcaccatcaccatcacggatcctatttaggtgacactatagaatcgtcgacccacgcgtccgggcagagagccaccccagatgcccctcctgctgatcttcaggatttcttgagtcggatctttcaagtacccccagggcagatgcccaatgggaacttctttgcagctcctcagcctgcccctggagccgctgcagcctctaagcccaacagcacagtacccaagggagaagccaaacctaagcggcggaagaaagtgaggaggcccttccaacgttgatgccccttctctttcctcaaatcaatgtcagggagtcaaaagggctgtagcacaggatggagtttgatttatccctcctcccccaacacctaggaactgaatctttttctttttattttttgagatggagtcttgctctgttgcccagctggagtgcagtggtgtgatctcagcttactgcaacctctgtctcccgggttcaagcaattctcccatctcagcctcctgagtagctgggattacaggcacacaccaccacacctggcccagctaattcttttttgtatttttagtagagacggggtttcaccatgttgcccaggctggtctcgaactcctgagctcaggtgatccacccgtcttggcctcccaaagtgctggattacaggcataagccactgtgcccggcctgaatcttgtcttttgacaataccaaagaaatagggggtagctagagtaaagaacctagggcctggacctgggctggacagtgtatccctttaggtgtgggaactgggtatttccctggggtctgtatgcctttgtcttgncatttgcttttanggcaaatgacacttttttcccncccttttnaaagctacaagtctatcttctttcttggacccatttcanggagggagccctcctccttttatcctgatataatattttaaaagancgaacaagaaagcatgtaccccnaattgaaangaaantnatcccanaaanttcaaaaactggaaactggaatttccccccantttccntttgggggaaaantccccaatttaagccnctttntgaaaggaaggccaaaattaanctctttttaaaaaaaaaattcngcccccnnccntgggnggagggggaaaaaanngggggttcccaaaaaccccctgngaacangggtngatttttttttaaattggccaattggnggcagnaaanttaacccgggaatnttttntnaaagaaagnggnananannnannnnataaatnaannntannaaaaanaanaaaaaanaaaaggggcccccnngggnaatnantatnagngcncgngaacaaagacaaccncntttaaaccnngcggggtt

SEQ ID NO: 20 - DNA, 1330 bp, Homo Sapiens
  misc_feature (917)..(917): n is a, c, g, or t
  misc_feature (934)..(934): n is a, c, g, or t
  misc_feature (953)..(953): n is a, c, g, or t
  misc_feature (960)..(960): n is a, c, g, or t
  misc_feature (982)..(982): n is a, c, g, or t
  misc_feature (992)..(992): n is a, c, g, or t
  misc_feature (1027)..(1027): n is a, c, g, or t
  misc_feature (1031)..(1031): n is a, c, g, or t
  misc_feature (1043)..(1043): n is a, c, g, or t
  misc_feature (1049)..(1049): n is a, c, g, or t
  misc_feature (1064)..(1064): n is a, c, g, or t
  misc_feature (1087)..(1087): n is a, c, g, or t
  misc_feature (1112)..(1112): n is a, c, g, or t
  misc_feature (1118)..(1118): n is a, c, g, or t
  misc_feature (1129)..(1130): n is a, c, g, or t
  misc_feature (1135)..(1135): n is a, c, g, or t
  misc_feature (1137)..(1138): n is a, c, g, or t
  misc_feature (1141)..(1141): n is a, c, g, or t
  misc_feature (1143)..(1144): n is a, c, g, or t
  misc_feature (1151)..(1152): n is a, c, g, or t
  misc_feature (1159)..(1159): n is a, c, g, or t
  misc_feature (1165)..(1165): n is a, c, g, or t
  misc_feature (1167)..(1167): n is a, c, g, or t
  misc_feature (1171)..(1172): n is a, c, g, or t
  misc_feature (1180)..(1181): n is a, c, g, or t
  misc_feature (1184)..(1184): n is a, c, g, or t
  misc_feature (1186)..(1186): n is a, c, g, or t
  misc_feature (1190)..(1190): n is a, c, g, or t
  misc_feature (1195)..(1196): n is a, c, g, or t
  misc_feature (1201)..(1202): n is a, c, g, or t
  misc_feature (1204)..(1205): n is a, c, g, or t
  misc_feature (1211)..(1212): n is a, c, g, or t
  misc_feature (1220)..(1220): n is a, c, g, or t
  misc_feature (1232)..(1234): n is a, c, g, or t
  misc_feature (1245)..(1246): n is a, c, g, or t
  misc_feature (1253)..(1255): n is a, c, g, or t
  misc_feature (1257)..(1257): n is a, c, g, or t
  misc_feature (1259)..(1260): n is a, c, g, or t
  misc_feature (1265)..(1266): n is a, c, g, or t
  misc_feature (1268)..(1268): n is a, c, g, or t
  misc_feature (1273)..(1273): n is a, c, g, or t
  misc_feature (1277)..(1277): n is a, c, g, or t
  misc_feature (1280)..(1280): n is a, c, g, or t
  misc_feature (1284)..(1286): n is a, c, g, or t
  misc_feature (1289)..(1289): n is a, c, g, or t
  misc_feature (1293)..(1293): n is a, c, g, or t
  misc_feature (1301)..(1301): n is a, c, g, or t
  misc_feature (1303)..(1303): n is a, c, g, or t
  misc_feature (1306)..(1306): n is a, c, g, or t
  misc_feature (1313)..(1314): n is a, c, g, or t
  misc_feature (1320)..(1321): n is a, c, g, or t
  misc_feature (1325)..(1325): n is a, c, g, or t
  misc_feature (1328)..(1328): n is a, c, g, or t
tagagaaattactatgagaggatcgcatcaccatcaccatcacggatcctatttaggtgacactatagaatcgtcgacccacgcgtccgcccacgcgtccgcggacctactgggctccatcctgagctccatggagaagccacccagcctcggtgaccaggagactcggcgcaaggcccgagaacaggccgcccgcctgaagaaactacaagagcaagagaaacaacagaaagtggagtttcgtaaaaggatggagaaggaggtgtcagatttcattcaagacagtgggcagatcaagaaaaagtttcagccaatgaacaagatcgagaggagcatactacatgatgtggtggaagtggctggcctgacatccttctcctttggggaagatgatgactgtcgctatgtcatgatcttcaaaaaggagtttgcaccctcagatgaagagctagactcttaccgtcgtggagaggaatgggacccccagaaggctgaggagaagcggaagctgaaggagctggcccagaggcaagaggaggaggcagcccagcaggggcctgtggtggtgagccctgccagcgactacaaggacaagtacagccacctcatcggcaagggagcagccaaagacgcagcccacatgctacaggccaataagacctacggctgtgtgcccgtggccaataagagggacacacgctccattgaagaggctatgaatgagatcagagccaagaagcgtctgcggcagagtggggaagagttgccgccaacctcctaggcgccccgcccagctccctttgacccctggggcagggcagggggcagggaaagacaaggctgctgctattagagcccatcctggagccccacctctgaaccacctcctaccagctgtccctcaggctgggggaaancaggtgttgatttgtcnccgttggagcttggatatntgcctgncatgtgtgtgtgtgtgtgaaantgtgaatgcncaggtgggtatttatctgtattattccccgttctngganttttcttccccntggggnctggggtactttacnttcaataaatactgtttaacccnaaaaaaaaaaaaaaaaaaaaaaaangggggncccccccttannggggncnnatnanncttaatnnctgaacntggacncnggtnnaaaatccnnaangncccncaaannccctnngnntttttnnaaaccccnggttgccccggnnnttttttttggnnaaaaccnnncntnnttggnnanttttngggnctnggannntantggnaaaaaatncnggntcccccnnttaatnncccnggncc

SEQ ID NO: 21 - DNA, 955 bp, Homo Sapiens
gattactatgagaggtcgcatcaccatcaccatcacggatcctatttaggtgacactatagaatcgtcgacccacgcgtccgcccacgcgtccgagcagccttccagcccaaggagttccaaccccccttgctcccagccccgccatgcagcctccagtgccgccctgcccagggccaggtctggaaagctcagcagctagtcggtggaatggggagacagaacccccggccgcccctgctgccctcctcaaggtgcccggagcaggaacagcccccaagcctgtgtcggtggcctgcacccagctggcattttctggccctaagctagcgccccggctcggcccccgcccagtgcctcctccacggcctgagagcactgggactgtgggcccaggccaggcccagcagagactggagcagaccagctcgtccctggcagctgcactgagagccgcagagaagagcattggcaccaaggagcaagagggcacccccagcgcctccaccaagcacattctggatgacatcagcaccatgttcgacgccctggctgaccagctggacgccatgctggactgagccctccagcagtgcccactgtgacctgccgaagtccactgcctttgccccagcacagaagaggcccctgccaccctagggacgggccaagggctggtcaggctgaagtgcccctcctagcagggccccttcccactcagcccgcggctgtgggcaccacagctcttgtggggcagcccaccttagaacctgactagcgagggacctccgctgcatctcagcaaagcccctcccagggtttgatcgattgagcaggacagccctgctcctggacagggaccctggtaagagctctctcctcaggaggagtaggggtgggggctttgggggggtgctttctctgtaccccccagcccatgtcccaagttgtgccaa

SEQ ID NO: 22 - DNA, 852 bp, Homo Sapiens
  misc_feature (788)..(789): n is a, c, g, or t
  misc_feature (791)..(791): n is a, c, g, or t
  misc_feature (795)..(798): n is a, c, g, or t
  misc_feature (800)..(852): n is a, c, g, or t
gagaaattactatgagaggatcgcatcaccatcaccatcacggatcctatttaggtgacactatagaatcgtcgacccacgcgtccgcccacgcgtccgcggacgcgtgggcaaattatgctgcagcatattgtactggcctgctgctggcccgcaggcttctcaataggtttggcatggacaagatctatgaaggccaagtggaggtgactggtgatgaatacaatgtggaaagcattgatggtcagccaggtgccttcacctgctatttggatgcaggccttgccagaactaccactggcaataaagtttttggtgccctgaagggagctgtggatggaggcttgtctatccctcacagtaccaaacgattccctggttatgattctgaaagcaaggaatttaatgcagaagtacatcggaagcacatcatgggccagaatgttgcagattacatgcgctacttaatggaagaagatgaagatgcttacaagaaacagttctctcaatacataaagaacagcgtaactccagacatgatggaggagatgtataagaaagctcatgctgctatacgagagaatccagtctatgaaaagaagcccaagaaagaagttaaaaagaagaggtggaaccgtcccaaaatgtcccttgctcagaagaaggatcgggtagctcaaaagaaggcaagcttcctcagagctcaggagcgggctgctgagagctaaacccagcaattttctatgattttttcagatatagataataaacttatgaacagcacctannanaaannnnannnnnnnnnnnnnnnnnnnnnnnnnnnnnnnnnnnnnnnnnnnnnnnnnnnnn

SEQ ID NO: 23 - DNA, 949 bp, Homo Sapiens
gagaggtcgcatcaccatcaccatcacggatcctatttaggtgacactatagaatcgtcgacccacgcgtccgcttcttcttctcggtggcggccccagcaaagacccccccgagtccacagcggcagcaaagttcccgcgctcaccgtcggccacgaagagcagcagggcatgcagcagcagaggcggcagctcccagccctcaactccttaccccagtttgggcaaccagctgccccgctgtttggcccaggcctgggccatgacggatgggtgggcgcccggggccgcgagaagggcggaacgctgtgcccagccggagactacgctgggtggcggcggcagcgccgggagtctgcagtgcgcgagggagaagtgagcgcacagcgcccagcgagcaggtgcctgcggcgcggagagcgcacacgctagccagcccgcagcggccgacacttggaccaacaaaagatattttcttctcagtcatgcatgcaaatatatggaagatcttagaaaattgtggaaagtggggcatactgaacaaaatcactgccatcagagagaatgaagtgatgcaagatcaggatgtgtcaggaagcccaggcgtgtgtcgccacgttgatctctgtgtgaaataggacggactcagtacctgcagctagacaacgctggagaaactccaaaggactgagtgccgcccaggcttcaggagagtaagacaacagacactatgcacttttctaatgtggccggcactctgtgcttgcaatcacatatgtgccacagacaggatttctatcaaacaaacaagaagaacagatggatgccaagcccgttgtcactttcctggtgcgtttaacaggagccaggggagaagtccagtttggggcgtcttgggaagtttccacatcatccatgaaattctgtggtggacttgtcacccacacca

SEQ ID NO: 24 - DNA, 1186 bp, Homo Sapiens
  misc_feature (827)..(827): n is a, c, g, or t
  misc_feature (834)..(834): n is a, c, g, or t
  misc_feature (887)..(887): n is a, c, g, or t
  misc_feature (901)..(901): n is a, c, g, or t
  misc_feature (912)..(912): n is a, c, g, or t
  misc_feature (938)..(938): n is a, c, g, or t
  misc_feature (941)..(941): n is a, c, g, or t
  misc_feature (944)..(944): n is a, c, g, or t
  misc_feature (947)..(947): n is a, c, g, or t
  misc_feature (953)..(953): n is a, c, g, or t
  misc_feature (976)..(976): n is a, c, g, or t
  misc_feature (987)..(987): n is a, c, g, or t
  misc_feature (1003)..(1003): n is a, c, g, or t
  misc_feature (1013)..(1013): n is a, c, g, or t
  misc_feature (1015)..(1015): n is a, c, g, or t
  misc_feature (1017)..(1017): n is a, c, g, or t
  misc_feature (1032)..(1032): n is a, c, g, or t
  misc_feature (1043)..(1043): n is a, c, g, or t
  misc_feature (1053)..(1054): n is a, c, g, or t
  misc_feature (1071)..(1075): n is a, c, g, or t
  misc_feature (1079)..(1079): n is a, c, g, or t
  misc_feature (1088)..(1088): n is a, c, g, or t
  misc_feature (1113)..(1113): n is a, c, g, or t
  misc_feature (1115)..(1115): n is a, c, g, or t
  misc_feature (1117)..(1119): n is a, c, g, or t
  misc_feature (1122)..(1122): n is a, c, g, or t
  misc_feature (1129)..(1129): n is a, c, g, or t
  misc_feature (1132)..(1132): n is a, c, g, or t
  misc_feature (1137)..(1137): n is a, c, g, or t
  misc_feature (1142)..(1142): n is a, c, g, or t
  misc_feature (1150)..(1151): n is a, c, g, or t
  misc_feature (1153)..(1153): n is a, c, g, or t
  misc_feature (1158)..(1159): n is a, c, g, or t
  misc_feature (1177)..(1177): n is a, c, g, or t
  misc_feature (1183)..(1183): n is a, c, g, or t
attagagaaattactatgagaggatcgcatcaccatcaccatcacggatcctatttaggtgacactatagaatcgtcgacccacgcgtccgcccacgcgtccggccgaccatggtgcccctgagcctcctgagcgtgccccagctgagcggagccggcgggggagggggagaggcgggtgccggcggcggcgctgccgcagtggccgccggtggcgtggtgaccacgaccgcctcggggaagcgcatccggaagaaccatgcctgcgagatgtgtggcaaggccttccgcgacgtctaccacctgaaccgacacaagctgtcgcactcggacgagaagccctaccagtgcccggtgtgccagcagcgcttcaagcgcaaggaccgcatgagctaccacgtgcgctcacatgacggcgctgtgcacaagccctacaactgctcccactgtggcaagagcttctcccggccggatcacctcaacagtcacgtcagacaagtgcactcaacagaacggcccttcaaatgtgagaaatgtgaggcagctttcgccacgaaggatcggctgcgggcgcacacagtacgacacgaggagaaagtgccatgtcacgtgtgtggcaagatgctgagctcggcttatatttcggaccacatgaaggtgcacagccagggtcctcaccatgtctgtgagctctgcaacaaaggtactggtgaggtttgtccaatggcggcggcagcggcagcggcggcagcggcagcagcggcagcagtagcagcccctcccacagctgtgggctccctctcggggggcggagggggtgcctgtganctctcanccacttccctcccaaccctggtgagctccaagttggttgcgggggaaaagggnaaaatggaataaantcccttggtanaagctcctctccccccttcttttccnacnaantcntatttncctaccaaccaaggaaccttccnaaaaggaaagnaagaaaaaatgttttnttaagggaantncnctaggttttaacganttgtttttccngctcctcttnnatcaaaacttgaccccnnnnnaaanctgttcccntcggttttgtttaaaatccccttgnanannnggncaagggntgnaaaanaaaanaaaaaccnntngcccnnacccccttttcttttttnaaaccnatg

SEQ ID NO: 25 - DNA, 1200 bp, Homo Sapiens
  misc_feature (750)..(750): n is a, c, g, or t
  misc_feature (774)..(774): n is a, c, g, or t
  misc_feature (777)..(777): n is a, c, g, or t
  misc_feature (807)..(807): n is a, c, g, or t
  misc_feature (811)..(811): n is a, c, g, or t
  misc_feature (832)..(832): n is a, c, g, or t
  misc_feature (848)..(848): n is a, c, g, or t
  misc_feature (869)..(869): n is a, c, g, or t
  misc_feature (872)..(872): n is a, c, g, or t
  misc_feature (877)..(877): n is a, c, g, or t
  misc_feature (886)..(886): n is a, c, g, or t
  misc_feature (895)..(895): n is a, c, g, or t
  misc_feature (899)..(899): n is a, c, g, or t
  misc_feature (902)..(902): n is a, c, g, or t
  misc_feature (908)..(908): n is a, c, g, or t
  misc_feature (910)..(910): n is a, c, g, or t
  misc_feature (912)..(912): n is a, c, g, or t
  misc_feature (918)..(918): n is a, c, g, or t
  misc_feature (922)..(922): n is a, c, g, or t
  misc_feature (927)..(927): n is a, c, g, or t
  misc_feature (934)..(934): n is a, c, g, or t
  misc_feature (944)..(944): n is a, c, g, or t
  misc_feature (947)..(947): n is a, c, g, or t
  misc_feature (955)..(955): n is a, c, g, or t
  misc_feature (961)..(961): n is a, c, g, or t
  misc_feature (964)..(964): n is a, c, g, or t
  misc_feature (976)..(976): n is a, c, g, or t
  misc_feature (983)..(983): n is a, c, g, or t
  misc_feature (993)..(993): n is a, c, g, or t
  misc_feature (999)..(999): n is a, c, g, or t
  misc_feature (1011)..(1011): n is a, c, g, or t
  misc_feature (1013)..(1013): n is a, c, g, or t
  misc_feature (1019)..(1019): n is a, c, g, or t
  misc_feature (1029)..(1029): n is a, c, g, or t
  misc_feature (1032)..(1032): n is a, c, g, or t
  misc_feature (1035)..(1039): n is a, c, g, or t
  misc_feature (1041)..(1042): n is a, c, g, or t
  misc_feature (1047)..(1047): n is a, c, g, or t
  misc_feature (1051)..(1051): n is a, c, g, or t
  misc_feature (1055)..(1056): n is a, c, g, or t
  misc_feature (1059)..(1059): n is a, c, g, or t
  misc_feature (1063)..(1064): n is a, c, g, or t
  misc_feature (1067)..(1068): n is a, c, g, or t
  misc_feature (1072)..(1072): n is a, c, g, or t
  misc_feature (1076)..(1077): n is a, c, g, or t
  misc_feature (1080)..(1080): n is a, c, g, or t
  misc_feature (1084)..(1086): n is a, c, g, or t
  misc_feature (1093)..(1093): n is a, c, g, or t
  misc_feature (1097)..(1097): n is a, c, g, or t
  misc_feature (1100)..(1100): n is a, c, g, or t
  misc_feature (1103)..(1103): n is a, c, g, or t
  misc_feature (1106)..(1106): n is a, c, g, or t
  misc_feature (1108)..(1109): n is a, c, g, or t
  misc_feature (1116)..(1116): n is a, c, g, or t
  misc_feature (1125)..(1125): n is a, c, g, or t
  misc_feature (1131)..(1131): n is a, c, g, or t
  misc_feature (1134)..(1134): n is a, c, g, or t
  misc_feature (1137)..(1139): n is a, c, g, or t
  misc_feature (1150)..(1150): n is a, c, g, or t
  misc_feature (1152)..(1153): n is a, c, g, or t
  misc_feature (1165)..(1165): n is a, c, g, or t
  misc_feature (1191)..(1192): n is a, c, g, or t
  misc_feature (1194)..(1195): n is a, c, g, or t
  misc_feature (1198)..(1199): n is a, c, g, or t
tagagagaattactatgagaggatcgcatcaccatcaccatcacggatcctatttaggtgacactatagaatcgtcgacccacgcgtccgcccacgcgtccggatcccgccggaagcgccaggacaatggggacccgggacgacgagtacgactacctattcaaagtggtgctcatcggggactcaggcgtgggcaagagcaacctgctgtcgcgcttcacccgcaacgagttcaacctggagagcaagagcaccatcggcgtggagttcgccacccgcagcatccaggtggacggcaagaccatcaaggcgcagatctgggacaccgctggccaggagcgctaccgcgccatcacctccgcgtactaccgtggtgcagtgggcgccctgctggtgtacgacatcgccaagcacctgacctatgagaacgtggagcgctggctgaaggagctgcgggaccacgcagacagcaacatcgtcatcatgctggtgggcaacaagagtgacctgcgccacctgcgggctgtgcccactgacgaggcccgcgccttcgcagaaaagaacaacttgtccttcatcgagacctcagccttggattccactaacgtagaggaagcattcaagaacatcctcacagagatctaccgcatcgtgtcacagaaacagatcgcagaccgtgctgcccacgacgagtccccggggaacaacgtggtggacatcagcgtgccgcccaccacggacggacagaancccaacaagctgcagtgctgccanaanctgtgacccctgcgcctccacccagcgtgngtgnacgtccttcgcccgtccccgnccaggtatcctctggnccctccctgctgtccctttgnggncgggntcgttccancccttccantganctntgcacngncngggccngggncccanaaagganaggaacccantgntttccccntcctgnccnggggaaaaaacntaaaaanccccggtttnttttcnccccatgaaaantngggttnccccaaaccnttnttnnnnngnntgggnaaangccnncanaatnnaanngggntttnnccnaaannnaaaaaanaaanggnggnaangnnccccccnttttccccntttttnttnggnnnaattttagggnannaattttcctccntcctttttttaaacgggggggccaannannccnnt

SEQ ID NO: 26 - DNA, 1143 bp, Homo Sapiens
  misc_feature (18)..(18): n is a, c, g, or t
  misc_feature (541)..(541): n is a, c, g, or t
  misc_feature (573)..(573): n is a, c, g, or t
  misc_feature (742)..(742): n is a, c, g, or t
  misc_feature (783)..(783): n is a, c, g, or t
  misc_feature (807)..(807): n is a, c, g, or t
  misc_feature (840)..(840): n is a, c, g, or t
  misc_feature (843)..(843): n is a, c, g, or t
  misc_feature (847)..(847): n is a, c, g, or t
  misc_feature (849)..(849): n is a, c, g, or t
  misc_feature (883)..(883): n is a, c, g, or t
  misc_feature (901)..(901): n is a, c, g, or t
  misc_feature (909)..(909): n is a, c, g, or t
  misc_feature (917)..(917): n is a, c, g, or t
  misc_feature (924)..(924): n is a, c, g, or t
  misc_feature (927)..(927): n is a, c, g, or t
  misc_feature (933)..(933): n is a, c, g, or t
  misc_feature (946)..(946): n is a, c, g, or t
  misc_feature (950)..(950): n is a, c, g, or t
  misc_feature (956)..(956): n is a, c, g, or t
  misc_feature (963)..(963): n is a, c, g, or t
  misc_feature (976)..(976): n is a, c, g, or t
  misc_feature (990)..(991): n is a, c, g, or t
  misc_feature (995)..(996): n is a, c, g, or t
  misc_feature (1002)..(1003): n is a, c, g, or t
  misc_feature (1005)..(1005): n is a, c, g, or t
  misc_feature (1009)..(1009): n is a, c, g, or t
  misc_feature (1013)..(1014): n is a, c, g, or t
  misc_feature (1020)..(1020): n is a, c, g, or t
  misc_feature (1022)..(1022): n is a, c, g, or t
  misc_feature (1025)..(1027): n is a, c, g, or t
  misc_feature (1036)..(1036): n is a, c, g, or t
  misc_feature (1039)..(1039): n is a, c, g, or t
  misc_feature (1044)..(1045): n is a, c, g, or t
  misc_feature (1047)..(1047): n is a, c, g, or t
  misc_feature (1050)..(1050): n is a, c, g, or t
  misc_feature (1055)..(1055): n is a, c, g, or t
  misc_feature (1065)..(1067): n is a, c, g, or t
  misc_feature (1073)..(1074): n is a, c, g, or t
  misc_feature (1078)..(1079): n is a, c, g, or t
  misc_feature (1081)..(1081): n is a, c, g, or t
  misc_feature (1083)..(1083): n is a, c, g, or t
  misc_feature (1086)..(1086): n is a, c, g, or t
  misc_feature (1088)..(1090): n is a, c, g, or t
  misc_feature (1092)..(1093): n is a, c, g, or t
  misc_feature (1095)..(1095): n is a, c, g, or t
  misc_feature (1098)..(1100): n is a, c, g, or t
  misc_feature (1102)..(1102): n is a, c, g, or t
  misc_feature (1106)..(1109): n is a, c, g, or t
  misc_feature (1112)..(1112): n is a, c, g, or t
  misc_feature (1114)..(1114): n is a, c, g, or t
  misc_feature (1116)..(1118): n is a, c, g, or t
  misc_feature (1123)..(1124): n is a, c, g, or t
  misc_feature (1127)..(1129): n is a, c, g, or t
  misc_feature (1131)..(1133): n is a, c, g, or t
  misc_feature (1135)..(1136): n is a, c, g, or t
  misc_feature (1139)..(1143): n is a, c, g, or t
aatatagagagaattacnatgagaggatcgcatcaccatcaccatcacggatcctatttaggtgacactatagaatcgtcgacccacgcgtccggcgccattcccagcatgccagggatcagcagtcagatcctcaccaatgctcagggacaggttattggaacccttccatgggtagtgaactcagctagtgtggcggccccagcaccagcccaaagcctgcaggtccaggccgtgaccccccagctgttgttgaacgcccagggccaggtgattgcgaccctggctagcagccccctgcctccacctgtggctgtccggaagccaagcacacctgagtcccctgctaagagtgaggtgcagcccatccagcccacaccaaccgtgccccagcctgctgtggtcattgccagcccagctccagccgccaagccatctgcctctgctcctatcccaattacctgctcagagacccccaccgtcagccagttggtgtccaagccacatactccaagtctggatgaggatgggatcaacttanaagagatccgggagtttgccaagaactttaanatccggcggctctcgctgggccttacacagacccaggtgggtcaggctctgactgcaacggaaggtccagcctacagccagtcagccatctgccggttcgagaagctagacatcacacccaagagtgcccagaagctaaagccggtgctggaaaagtggctaaacgaanctgaactgcggaaccaggaaggccagcagaacctgatggantttgtgggaggcgagccctccaanaaacgcaaacgccgcacctccttcaccccccangcnatanangctctcaatgcctattttgaaaaaaacccactgncccacaggccaagaaatnactgaaanttgctaangaactcnaantacaancgtgaagtaatgngggntctggnttctgcnatcgggccaaaancttaaaaacaccannaaanntgaaanntntttnaaanncccttnanggnnncaacccccnggnccctnngnttncaaanaattttttcnnntttccnngggnnancnggntnnnannantgnnntngaannnnccntntnnnttttnnccnnntnnnannttnnnnn

SEQ ID NO: 27 - DNA, 1200 bp, Homo Sapiens
  misc_feature (710)..(710): n is a, c, g, or t
  misc_feature (767)..(767): n is a, c, g, or t
  misc_feature (929)..(929): n is a, c, g, or t
  misc_feature (978)..(979): n is a, c, g, or t
  misc_feature (1000)..(1000): n is a, c, g, or t
  misc_feature (1027)..(1028): n is a, c, g, or t
  misc_feature (1034)..(1034): n is a, c, g, or t
  misc_feature (1041)..(1041): n is a, c, g, or t
  misc_feature (1044)..(1044): n is a, c, g, or t
  misc_feature (1065)..(1067): n is a, c, g, or t
  misc_feature (1091)..(1091): n is a, c, g, or t
  misc_feature (1110)..(1110): n is a, c, g, or t
  misc_feature (1115)..(1115): n is a, c, g, or t
  misc_feature (1122)..(1122): n is a, c, g, or t
  misc_feature (1124)..(1124): n is a, c, g, or t
  misc_feature (1129)..(1129): n is a, c, g, or t
  misc_feature (1134)..(1134): n is a, c, g, or t
  misc_feature (1147)..(1147): n is a, c, g, or t
  misc_feature (1152)..(1152): n is a, c, g, or t
  misc_feature (1163)..(1163): n is a, c, g, or t
  misc_feature (1174)..(1174): n is a, c, g, or t
  misc_feature (1186)..(1186): n is a, c, g, or t
  misc_feature (1193)..(1193): n is a, c, g, or t
  misc_feature (1199)..(1199): n is a, c, g, or t
tagagagaattactatgagaggatcgcatcaccatcaccatcacggatcctatttaggtgacactatagaatcgtcgacccacgcgtccgccctgtcctccagtggtgaaagctgggagactctgccggggaaagaagagcgggaacctccacaggctaaggtgagtgccagcactggcaccagccctggccccggtgctagtgccagtgccggggctggcgccggggccagtgctggcagcaatggcagcaattaccttgaagaagttcgagaaccatctcttcaggaagagcaggcatccctggaagaaggagaaattccttggctccagtaccatgagaatgacagtagcagtgagggggataatgattctggtcacgagttgatgcaacctggggtattcatgctggatggaaacaacaaccttgaagatgactccagtgtgagcgaagacctagaagtggattggagcctctttgatggatttgcagatgggttaggagtggctgaagccatttcctatgtggaccctcagttcctcacctacatggcacttgaagaacgcctggcccaggcaatggaaactgcccttgcgcacttggagtctctcgcagtggatgtagaggtggccaatccaccagcaagcaaggagagcattgacgctcttcccgagatcctggtcactgaagatcatggcgcagttggtcangagatgtgctgccccatctgctgtagcgaatatgtgaagggggaggtggcaactganctgccgtgccaccactatttccacaagcccgtgtgtgtccatctggcttcaaaagtcaggcacctgccccgtgtgccgctgcatgttccctccccccactctaaaaaaccaaggccgtttactcctggtctgaattattttccccatctgaaatcccccaanactgcaaggagccctctttgaaattaacaatgggaaataaaaccaatcnntccatttaaccctaaacctantgattcccccgggaatattttccaatnngaaaanagttgtngtntgaattgccttaaaaatccannnccctctttttaaggttaaaaaaanggaaaactaaacctttctnaatgncaacttngnaaatngcaanaaaaaaaaaaccnttttncaaccggaaanttaaatcccantttttttcctcnaaaaaanggaaang

SEQ ID NO: 28 - DNA, 1305 bp, Homo Sapiens
  misc_feature (1)..(1): n is a, c, g, or t
  misc_feature (110)..(110): n is a, c, g, or t
  misc_feature (127)..(127): n is a, c, g, or t
  misc_feature (183)..(183): n is a, c, g, or t
  misc_feature (206)..(206): n is a, c, g, or t
  misc_feature (234)..(234): n is a, c, g, or t
  misc_feature (347)..(347): n is a, c, g, or t
  misc_feature (381)..(381): n is a, c, g, or t
  misc_feature (410)..(410): n is a, c, g, or t
  misc_feature (443)..(443): n is a, c, g, or t
  misc_feature (656)..(656): n is a, c, g, or t
  misc_feature (759)..(759): n is a, c, g, or t
  misc_feature (810)..(810): n is a, c, g, or t
  misc_feature (813)..(813): n is a, c, g, or t
  misc_feature (845)..(845): n is a, c, g, or t
  misc_feature (847)..(847): n is a, c, g, or t
  misc_feature (850)..(850): n is a, c, g, or t
  misc_feature (861)..(861): n is a, c, g, or t
  misc_feature (863)..(863): n is a, c, g, or t
  misc_feature (867)..(867): n is a, c, g, or t
  misc_feature (882)..(882): n is a, c, g, or t
  misc_feature (894)..(894): n is a, c, g, or t
  misc_feature (909)..(909): n is a, c, g, or t
  misc_feature (912)..(912): n is a, c, g, or t
  misc_feature (918)..(918): n is a, c, g, or t
  misc_feature (921)..(922): n is a, c, g, or t
  misc_feature (926)..(926): n is a, c, g, or t
  misc_feature (928)..(929): n is a, c, g, or t
  misc_feature (946)..(946): n is a, c, g, or t
  misc_feature (955)..(955): n is a, c, g, or t
  misc_feature (960)..(960): n is a, c, g, or t
  misc_feature (963)..(963): n is a, c, g, or t
  misc_feature (966)..(966): n is a, c, g, or t
  misc_feature (968)..(968): n is a, c, g, or t
  misc_feature (978)..(979): n is a, c, g, or t
  misc_feature (984)..(984): n is a, c, g, or t
  misc_feature (988)..(988): n is a, c, g, or t
  misc_feature (999)..(999): n is a, c, g, or t
  misc_feature (1009)..(1009): n is a, c, g, or t
  misc_feature (1019)..(1020): n is a, c, g, or t
  misc_feature (1024)..(1025): n is a, c, g, or t
  misc_feature (1031)..(1031): n is a, c, g, or t
  misc_feature (1036)..(1036): n is a, c, g, or t
  misc_feature (1040)..(1040): n is a, c, g, or t
  misc_feature (1043)..(1043): n is a, c, g, or t
  misc_feature (1046)..(1046): n is a, c, g, or t
  misc_feature (1052)..(1053): n is a, c, g, or t
  misc_feature (1063)..(1063): n is a, c, g, or t
  misc_feature (1065)..(1065): n is a, c, g, or t
  misc_feature (1069)..(1069): n is a, c, g, or t
  misc_feature (1074)..(1074): n is a, c, g, or t
  misc_feature (1080)..(1081): n is a, c, g, or t
  misc_feature (1086)..(1088): n is a, c, g, or t
  misc_feature (1090)..(1091): n is a, c, g, or t
  misc_feature (1093)..(1094): n is a, c, g, or t
  misc_feature (1104)..(1104): n is a, c, g, or t
  misc_feature (1107)..(1113): n is a, c, g, or t
  misc_feature (1115)..(1115): n is a, c, g, or t
  misc_feature (1124)..(1124): n is a, c, g, or t
  misc_feature (1126)..(1126): n is a, c, g, or t
  misc_feature (1129)..(1130): n is a, c, g, or t
  misc_feature (1135)..(1136): n is a, c, g, or t
  misc_feature (1145)..(1145): n is a, c, g, or t
  misc_feature (1147)..(1150): n is a, c, g, or t
  misc_feature (1156)..(1156): n is a, c, g, or t
  misc_feature (1162)..(1162): n is a, c, g, or t
  misc_feature (1167)..(1167): n is a, c, g, or t
  misc_feature (1169)..(1169): n is a, c, g, or t
  misc_feature (1174)..(1174): n is a, c, g, or t
  misc_feature (1177)..(1177): n is a, c, g, or t
  misc_feature (1185)..(1185): n is a, c, g, or t
  misc_feature (1187)..(1191): n is a, c, g, or t
  misc_feature (1195)..(1195): n is a, c, g, or t
  misc_feature (1197)..(1197): n is a, c, g, or t
  misc_feature (1199)..(1199): n is a, c, g, or t
  misc_feature (1206)..(1209): n is a, c, g, or t
  misc_feature (1211)..(1211): n is a, c, g, or t
  misc_feature (1214)..(1214): n is a, c, g, or t
  misc_feature (1218)..(1218): n is a, c, g, or t
  misc_feature (1224)..(1224): n is a, c, g, or t
  misc_feature (1227)..(1231): n is a, c, g, or t
  misc_feature (1237)..(1237): n is a, c, g, or t
  misc_feature (1253)..(1254): n is a, c, g, or t
  misc_feature (1256)..(1256): n is a, c, g, or t
  misc_feature (1260)..(1262): n is a, c, g, or t
  misc_feature (1272)..(1275): n is a, c, g, or t
  misc_feature (1279)..(1279): n is a, c, g, or t
  misc_feature (1283)..(1283): n is a, c, g, or t
  misc_feature (1286)..(1288): n is a, c, g, or t
  misc_feature (1292)..(1292): n is a, c, g, or t
  misc_feature (1302)..(1305): n is a, c, g, or t
naattagagaaattactatgagaggatcgcatcaccatcaccatcacggatcctatttaggtgacactatagaatcgtcgacccacgcgtccgcccacgcgtccgcccangcgtccggagccatggntcagaaaatggactgtggtgcgggcctcctcggcttccaggctgaggcctccgtanaagacagcgccttgcttatgcanaccttgatggaggccatccagatctcanaggctccacctactaaccaggccaccgcagctgctagtccccagagttcacagcccccaactgccaatgagatggctgacattcaggtttcagcagctgccgctaggcctaantcagcctttaaagtccagaatgccaccacaaaangcccaaatggtgtctatgatttctctcangctcataatgccaaggatgtgcccaacacgcancccaaggcagcctttaagtcccaaaatgctaccccaaagggtccaaatgctgcctatgatttttcccaggcagcaaccactggtgagttagctgctaacaagtctgagatggccttcaaggcccagaatgccactactaaagtgggcccaaatgccacctacaatttctctcagtctctcaatgccaatgacctggccaacagcaggcctaanacccctttcaaggcttggaatgataccactaaggccccaacagctgatacccagacccagaatgtaaatcaggccaaaatggccacttcccaggctgacatanagaccgacccaggtatctctgaacctgacggtgcaactgcacagacatcancanatggttcccaggctcaaaatctggagtcccgnanaanaattcggggcnanaagnacccgcaagatttantaacttgaatgnttgaaaaaaaacaancantggggnatnnaaangnngggccccactgggctgnaagggaacntggangtntgncnccaattccannggacnactncaaaaaacccnccttggggcnaccccccaanntggnnctgggnaaaancccnttnggnttttgnnaaaacccccncngggntgggnaaaacnnaaaannncnngnnaaaacccccnccnnnnnnntnaaaaacccntncannttagnnaaaaccccncnnnncttggnaaaaancccantnccttnggnaaaacccntnnnnntttngncnaaacccnnnnanttngggnaaaaanccnnnnntttggncaaaaccccttttttnngncccnnncctttttttnnnnaaancccnggnnngggnaaaacccctnnnn

SEQ ID NO: 29 - DNA, 957 bp, Homo Sapiens
aactatgagaggatcgcatcaccatcaccatcacggatcctatttaggtgacactatagaatcgtcgacccacgcgtccggtcggggaaaccagcacgatgtgccagtcattcctttggatgtagtagataatcagacagagaagttggacaccaacataactgaggtggatgcagcctccgtttacacgctgcctgctggagctgacttcctcatgtgttactctgttgcagaaggatattattctcaccgggaaactgtgaacggctcatggtacattcaagatttgtgtgagatgttgggaaaatatggctcctccttagagttcacagaactcctcacactggtgaacaggaaagtttctcagcgccgagtggacttttgcaaagacccaagtgcaattggaaagaagcaggttccctgttttgcctcaatgctaactaaaaagctgcatttctttccaaaatctaattaattaatagaggctatctaattttacactctgtattgaaaatggctttctcagccaggcgtggttactcacacctgtaatcccagcactttgggagtccaaggtgggcggatcacctgaggtcgggagttcgagaccagcctgaccaacatggagaagccccgtctctactaaaaatgcaaaaaaaaatttagctaggcatggcggcgcatgcctgcaatcccagctacttggaaggctgaggcaggagaatcacttgaacccaggaggtggaggctgcggtgagccgagattgcgccattgcactccagcctgggcaacgagtgaaactccgtctcaaaaaaaagaaaatgtctttctcttccttttatataaatatcgttagggtgaagcattatggtctaatgattcaaatgttttaaagtttaatgcctagcagagaactgccttaaaaaaaaaaaaaaaaagttcatgttggccatggt

SEQ ID NO: 30 - DNA, 1016 bp, Homo Sapiens
  misc_feature (2)..(2): n is a, c, g, or t
  misc_feature (828)..(828): n is a, c, g, or t
  misc_feature (860)..(860): n is a, c, g, or t
  misc_feature (873)..(873): n is a, c, g, or t
  misc_feature (887)..(887): n is a, c, g, or t
  misc_feature (909)..(909): n is a, c, g, or t
  misc_feature (925)..(925): n is a, c, g, or t
  misc_feature (937)..(937): n is a, c, g, or t
  misc_feature (950)..(950): n is a, c, g, or t
  misc_feature (967)..(967): n is a, c, g, or t
  misc_feature (970)..(970): n is a, c, g, or t
  misc_feature (979)..(980): n is a, c, g, or t
  misc_feature (991)..(991): n is a, c, g, or t
  misc_feature (1005)..(1005): n is a, c, g, or t
  misc_feature (1008)..(1008): n is a, c, g, or t
  misc_feature (1013)..(1013): n is a, c, g, or t
  misc_feature (1016)..(1016): n is a, c, g, or t
antagagagattaactatgagaggatcgcatcaccatcaccatcacggatcctatttaggtgacactatagaatcgtcgacccacgcgtccggcgtcgctccgggagctgccgacggacggagcgcccccgcccccgcccggccgcccgcccgccgccgccatgcccttctccaacagccacaacgcactgaagctgcgcttcccggccgaggacgagttccccgacctgagcgcccacaacaaccacatggccaaggtgctgacccccgagctgtacgcggagctgcgcgccaagagcacgccgagcggcttcacgctggacgacgtcatccagacaggcgtggacaacccgggccacccgtacatcatgaccgtgggctgcgtggcgggcgacgaggagtcctacgaagtgttcaaggatctcttcgaccccatcatcgaggaccggcacggcggctacaagcccagcgatgagcacaagaccgacctcaaccccgacaacctgcagggcggcgacgacctggaccccaactacgtgctgagctcgcgggtgcgcacgggccgcagcatccgtggcttctgcctccccccgcactgcagccgcggggagcgccgagccatcgagaagctcgcggtggaagccctgtccagcctggacggcgacctggcgggccgatactacgcgctcaagagcatgacggaggcggagcagcagcagctcatcgacgaccacttcctcttcgacaagcccgtgtcgcccctgctgctggcctcgggcatggcccgcgactggcccgacgcccgcggtatctggcacaatgacaatnaagaccttcctggtgtgggtcaacgaagaagnaccacctgcgggntcatctccatgcanaaaggggggcaacatgaaggangtgttcaccccgcttntgcacgggcttnaccaaattgaaantcttttcaagttctaangantataatttnngtgaaaccctnaacttgggctaatnctnactgnccn

SEQ ID NO: 31 - DNA, 1806 bp, Homo Sapiens
accatcaccatcacggatcctatttaggtgacactatagaatcgtcgacccacgcgtccgccgggggcggagcgggatcgagccctcgccgaggcctgccgccatgggcccgcgccgccgccgccgcctgtcacccgggccgcgcgggccgtgagcgtcatggccttggccggggcccctgcgggcggcccatgcgcgccggcgctggaggccctgctcggggccggcgcgctgcggctgctcgactcctcgcagatcctcatcatctccgccgcgcaggacgccagcgccccgccggctcccaccggccccgcggcgcccgccgccggcccctgcgaccctgacctgctgctcttcgccacaccgcaggcgccccggcccacacccagtgcgccgcggcccgcgctcggccgcccgccggtgaagcggaggctggacctggaaactgaccatcagtacctggccgagagcagtgggccagctcggggcagaggccgccatccaggaaaaggtgtgaaatccccgggggagaagtcacgctatgagacctcactgaatctgaccaccaagcgcttcctggagctgctgagccactcggctgacggtgtcgtcgacctgaactggaattaactatgagaggtcgcatcaccatcaccatcacggatcctatttaggtgacactatagaatcgtcgacccacgcgtccggtacgtcttctccagttgtcccttctcatccccctgtgcagcaagtgaaagaattgaatccagatgaggctagccctcaggtgaacacctcagcagatcagaacactcttccctcttcacagtcaaccacaatggtttctccccttttgaccaatagtccagggtcctctggcaaccggcgaagcccagtctcgtctagtaagggcaaaggaaaagtggacaaaattggccaaattttgttgaccaaggcatgtaagaaagttacaggctctcttgagaaaggggaagaacaatatggtgcagatggagagactgaaggccaagggctagacaccacagctccggggctcatgggaacagagcagttatccacagagctggacagtaaaaccccaacgcccccagcacccactctgctaaaaatgacctctagccctgtgggcccgggcactgcctcagcaggacccagcttacctggcggtgctctccccaccagtgtacgctcgatagtaaccactctggtaccctccgagctcatctccgccgtaccgaccacaaaaagcaatcatggtggcatagcatctgagtcacttgcgggtggcctagtggaggagaaggtgggatcccatccagaacttctacccagcatagccccgtcgcagaatttagtctcaaaggaaacttcaaccacagcactgcaggcctctgttgccagaccagagctggaggtaaatgctgccatagtctctggacaaagcagtgagcccaaagagatagttgaaaagtccaaaatcccaggccgaagaaactcccgaactgaagagccaactgtggcctctgaaagtgtggaaaatggacatcgtaaacgatcttctcgacctgcttcagcctccagctctactaaagacataaccagtgcggtgcaatccaagcgagaaaatccaagtaaacaagcaggagctgccgaggtgctgaaggtgcagaagcggcgcatctatgacatcaccaacgtccttgagggcatccagctcattgccaagaagtccaagaaccacatccagtggctgggcagccacaccacagtgggcgtcggcggacg

SEQ ID NO: 32 - DNA, 1042 bp, Homo Sapiens
aattaactatgagaggtcgcatcaccatcaccatcacggatcctatttaggtgacactatagaatcgtcgacccacgcgtccggtacgtcttctccagttgtcccttctcatccccctgtgcagcaagtgaaagaattgaatccagatgaggctagccctcaggtgaacacctcagcagatcagaacactcttccctcttcacagtcaaccacaatggtttctccccttttgaccaatagtccagggtcctctggcaaccggcgaagcccagtctcgtctagtaagggcaaaggaaaagtggacaaaattggccaaattttgttgaccaaggcatgtaagaaagttacaggctctcttgagaaaggggaagaacaatatggtgcagatggagagactgaaggccaagggctagacaccacagctccggggctcatgggaacagagcagttatccacagagctggacagtaaaaccccaacgcccccagcacccactctgctaaaaatgacctctagccctgtgggcccgggcactgcctcagcaggacccagcttacctggcggtgctctccccaccagtgtacgctcgatagtaaccactctggtaccctccgagctcatctccgccgtaccgaccacaaaaagcaatcatggtggcatagcatctgagtcacttgcgggtggcctagtggaggagaaggtgggatcccatccagaacttctacccagcatagccccgtcgcagaatttagtctcaaaggaaacttcaaccacagcactgcaggcctctgttgccagaccagagctggaggtaaatgctgccatagtctctggacaaagcagtgagcccaaagagatagttgaaaagtccaaaatcccaggccgaagaaactcccgaactgaagagccaactgtggcctctgaaagtgtggaaaatggacatcgtaaacgatcttctcgacctgcttcagcctccagctctactaaagacataaccagtgcggtgcaatccaagcgagaaaatccaagtaaacaagcagga

SEQ ID NO: 33 - DNA, 1198 bp, Homo Sapiens
  misc_feature (854)..(854): n is a, c, g, or t
  misc_feature (925)..(925): n is a, c, g, or t
  misc_feature (928)..(928): n is a, c, g, or t
  misc_feature (930)..(930): n is a, c, g, or t
  misc_feature (933)..(933): n is a, c, g, or t
  misc_feature (936)..(936): n is a, c, g, or t
  misc_feature (956)..(956): n is a, c, g, or t
  misc_feature (962)..(962): n is a, c, g, or t
  misc_feature (965)..(965): n is a, c, g, or t
  misc_feature (1010)..(1010): n is a, c, g, or t
  misc_feature (1024)..(1024): n is a, c, g, or t
  misc_feature (1027)..(1027): n is a, c, g, or t
  misc_feature (1037)..(1037): n is a, c, g, or t
  misc_feature (1044)..(1044): n is a, c, g, or t
  misc_feature (1053)..(1053): n is a, c, g, or t
  misc_feature (1055)..(1055): n is a, c, g, or t
  misc_feature (1061)..(1061): n is a, c, g, or t
  misc_feature (1065)..(1065): n is a, c, g, or t
  misc_feature (1078)..(1078): n is a, c, g, or t
  misc_feature (1082)..(1082): n is a, c, g, or t
  misc_feature (1090)..(1090): n is a, c, g, or t
  misc_feature (1119)..(1120): n is a, c, g, or t
  misc_feature (1133)..(1133): n is a, c, g, or t
  misc_feature (1135)..(1136): n is a, c, g, or t
  misc_feature (1146)..(1146): n is a, c, g, or t
  misc_feature (1148)..(1148): n is a, c, g, or t
  misc_feature (1150)..(1150): n is a, c, g, or t
  misc_feature (1158)..(1158): n is a, c, g, or t
  misc_feature (1180)..(1180): n is a, c, g, or t
  misc_feature (1183)..(1183): n is a, c, g, or t
aatagagaaattactatgagaggatcgcatcaccatcaccatcacggatcctatttaggtgacactatagaatcgtcgacccacgcgtccgataatgaggactattccaggtatccgccaagagagtacagagcttcgggtagcagaagaggaatggcctatggacatattgactcttatggggcagatgatagtgaggaggagggggctgggcctgttgagcgaccgccagtgagagggaaaactggcaagtttaaagatgataagctgtatgacccagagaaaggggcaaggtctttggctgggccacctccacatttctctagttttagccgtgatgtgagagaggagcgagacaagttagacccagtccctgcagcaagatgctcagctagcagagctgacttcctgccacaaagtagtgtggcctcacagtcgtcttctgaaggcaagctggctacaaaaggtgacagctcggagagggagagaagggagcaaaatttacctgcacgtcccagcagggctcctgtgagtatttgtggtggtggggaaaacacctcaaagagtgcagaggaacctgtggtcaggcccaaaatcagaaacctggcaagtccaaactgcgtgaaaccaaaaattttttttgatactgatgatgatgacgatatgccacacagtacttccaggtggagggataccgccaatgacaatgagggccactcggatggcctggcaagaagagggagaggcgagagttcaagtggctatcccgagccaaagtaccctgaagacaaacgggaagcgaggagtgaccaagtgaaaccagaaaaggtgccgagacgacgacgcaccatggnccgacccctgacttctggacgcacagtgatgattactacaaaatactgcgacgaaaactctgacagtgacnaanantgnatngctgctctgcgtcggaaaantcgaanccnaaagcaaacccctgtcctccatggtgaaactgggaaactctgccngggaaaaaaaaacnggnaacctcccangctaagngagtgccancnctggcnccancccctgcccccgngctntgccaatnccgggctggccccgggcccattgctggcnncaatggcaaccantnncttgaaaaantncnaaaacctnttttcggaaaaacaagcctccntgnaaaaaaaaaattcct

SEQ ID NO: 34 - DNA, 1349 bp, Homo Sapiens
  misc_feature (752)..(752): n is a, c, g, or t
  misc_feature (902)..(902): n is a, c, g, or t
  misc_feature (928)..(928): n is a, c, g, or t
  misc_feature (931)..(931): n is a, c, g, or t
  misc_feature (934)..(934): n is a, c, g, or t
  misc_feature (936)..(936): n is a, c, g, or t
  misc_feature (951)..(951): n is a, c, g, or t
  misc_feature (953)..(953): n is a, c, g, or t
  misc_feature (979)..(979): n is a, c, g, or t
  misc_feature (988)..(988): n is a, c, g, or t
  misc_feature (996)..(996): n is a, c, g, or t
  misc_feature (1007)..(1007): n is a, c, g, or t
  misc_feature (1034)..(1034): n is a, c, g, or t
  misc_feature (1056)..(1056): n is a, c, g, or t
  misc_feature (1062)..(1062): n is a, c, g, or t
  misc_feature (1064)..(1113): n is a, c, g, or t
  misc_feature (1116)..(1118): n is a, c, g, or t
  misc_feature (1123)..(1124): n is a, c, g, or t
  misc_feature (1133)..(1134): n is a, c, g, or t
  misc_feature (1142)..(1143): n is a, c, g, or t
  misc_feature (1148)..(1148): n is a, c, g, or t
  misc_feature (1152)..(1155): n is a, c, g, or t
  misc_feature (1162)..(1162): n is a, c, g, or t
  misc_feature (1164)..(1164): n is a, c, g, or t
  misc_feature (1167)..(1170): n is a, c, g, or t
  misc_feature (1172)..(1172): n is a, c, g, or t
  misc_feature (1175)..(1175): n is a, c, g, or t
  misc_feature (1178)..(1179): n is a, c, g, or t
  misc_feature (1181)..(1184): n is a, c, g, or t
  misc_feature (1187)..(1189): n is a, c, g, or t
  misc_feature (1193)..(1193): n is a, c, g, or t
  misc_feature (1200)..(1203): n is a, c, g, or t
  misc_feature (1206)..(1206): n is a, c, g, or t
  misc_feature (1212)..(1212): n is a, c, g, or t
  misc_feature (1219)..(1221): n is a, c, g, or t
  misc_feature (1232)..(1232): n is a, c, g, or t
  misc_feature (1239)..(1239): n is a, c, g, or t
  misc_feature (1241)..(1241): n is a, c, g, or t
  misc_feature (1243)..(1244): n is a, c, g, or t
  misc_feature (1248)..(1248): n is a, c, g, or t
  misc_feature (1251)..(1251): n is a, c, g, or t
  misc_feature (1253)..(1255): n is a, c, g, or t
  misc_feature (1259)..(1259): n is a, c, g, or t
  misc_feature (1261)..(1261): n is a, c, g, or t
  misc_feature (1263)..(1263): n is a, c, g, or t
  misc_feature (1269)..(1273): n is a, c, g, or t
  misc_feature (1275)..(1281): n is a, c, g, or t
  misc_feature (1283)..(1283): n is a, c, g, or t
  misc_feature (1285)..(1286): n is a, c, g, or t
  misc_feature (1297)..(1297): n is a, c, g, or t
  misc_feature (1299)..(1299): n is a, c, g, or t
  misc_feature (1301)..(1303): n is a, c, g, or t
  misc_feature (1307)..(1307): n is a, c, g, or t
  misc_feature (1312)..(1315): n is a, c, g, or t
  misc_feature (1317)..(1318): n is a, c, g, or t
  misc_feature (1320)..(1324): n is a, c, g, or t
  misc_feature (1330)..(1330): n is a, c, g, or t
  misc_feature (1334)..(1337): n is a, c, g, or t
  misc_feature (1342)..(1344): n is a, c, g, or t
  misc_feature (1347)..(1349): n is a, c, g, or t
attagagaaattactatgagaggatcgcatcaccatcaccatcacggatcctatttaggtgacactatagaatcgtcgacccacgcgtccggcgcggctcgggcttccgccttggggagccggcggcggagtccgggacgtggagacccggggtcccggcagccgggcggcccgcgggcccagggtggggatgcaccgccgcggggtgggagctggcgccatcgccaagaagaaacttgcagaggccaagtataaggagcgagggacggtcttggctgaggaccagctagcccagatgtcaaagcagttggacatgttcaagaccaacctggaggaatttgccagcaaacacaagcaggagatccggaagaatcctgagttccgtgtgcagttccaggacatgtgtgcaaccattggcgtggatccgctggcctctggaaaaggattttggtctgagatgctgggcgtgggggacttctattacgaactaggtgtccaaattatcgaagtgtgcctggcgctgaagcatcggaatggaggtctgataactttggaggaactacatcaacaggtgttgaagggaaggggcaagttcgcccaggatgtcagtcaagatgacctgatcagagccatcaagaaactaaaggcacttggcactggcttcggcatcatccctgtgggcggcacttacctcattcagtctgttccagctgagctcaatatggatcacaccgtggtgctgcagctggcanagaagaatggctacgtgactgtcagtgagatcaaagccagtcttaaatgggagaccgagcgagcgcggcaagtgctggaacacctgctgaaagaagggttggcgtggctggacttacaggccccaggggaggcccactactggctgccanctctcttcactgacctctactcccanganatnanagctgaagaggccananaacccctccctgactgcatgtggaanggcacacancaaccagncagggaaggangcggaagtggcaaataaaccctggggnaattttttttttccaaaaaaanaaaaanannnnnnnnnnnnnnnnnnnnnnnnnnnnnnnnnnnnnnnnnnnnnnnnnnggnnnccccnnccaaaaggnnccaaaaanncttanttannnnaaatttngnccnnnntntanaanncnnnnaannncccnaaacccnnnngantttttnaaaactnnnttcccccgggnttttttntngnnaaanccncnnntttngnanattttnnnnntnnnnnnnantnnaaaaaaaaccngnannncccnttaannnncnngnnnnnaaaaantttnnnnttttnnnttnnn

SEQ ID NO: 35 - DNA, 968 bp, Homo Sapiens
gagaattaactatgagaggtcgcatcaccatcaccatcacggatcctatttaggtgacactatagaatcgtcgacccacgcgtccgatgaaataagcgagaagatccctcttctcccccctctctctcttgccccctccccccctcccctcccctctccccttgactcctctccgaggcaccatgctgacccgcctgttcagcgagcccggccttctctcggacgtgcccaagttcgccagctggggcgacggcgaagacgacgagccgaggagcgacaagggcgacgcgccgccaccgccaccgcctgcgcccgggccaggggctccggggccagcccgggcggccaagccagtccctctccgtggagaagaggggacggaggccacgttggccgaggtcaaggaggaaggcgagctggggggagaggaggaggaggaagaggaggaggaagaaggactggacgaggcggagggcgagcggcccaagaagcgcgggcccaagaagcgcaagatgaccaaggcgcgcttggagcgctccaagcttcggcggcagaaggcgaacgcgcgggagcgcaaccgcatgcacgacctgaacgcagccctggacaacctgcgcaaggtggtgccctgctactccaagacgcagaagctgtccaagatcgagacgctgcgcctagccaagaactatatctgggcgctctcggagatcctgcgctccggcaagcggccagacctagtgtcctacgtgcagactctgtgcaagggtctgtcgcagcccaccaccaatctggtggccggctgtctgcagctcaactctcgcaacttcctcacggagcaaggcgccgacggtgccggccgcttccacggctcgggcggcccgttcgccatgcacccctacccgtacccgtgctcgcgcctggcgggcgcacagtgccaggcgggccggcggcctgggcggcggcgcggc

SEQ ID NO: 36 - DNA, 1326 bp, Homo Sapiens
  misc_feature (941)..(941): n is a, c, g, or t
  misc_feature (964)..(965): n is a, c, g, or t
  misc_feature (975)..(975): n is a, c, g, or t
  misc_feature (990)..(990): n is a, c, g, or t
  misc_feature (1013)..(1013): n is a, c, g, or t
  misc_feature (1021)..(1021): n is a, c, g, or t
  misc_feature (1026)..(1026): n is a, c, g, or t
  misc_feature (1029)..(1029): n is a, c, g, or t
  misc_feature (1036)..(1036): n is a, c, g, or t
  misc_feature (1038)..(1040): n is a, c, g, or t
  misc_feature (1050)..(1050): n is a, c, g, or t
  misc_feature (1062)..(1062): n is a, c, g, or t
  misc_feature (1067)..(1067): n is a, c, g, or t
  misc_feature (1086)..(1086): n is a, c, g, or t
  misc_feature (1095)..(1096): n is a, c, g, or t
  misc_feature (1099)..(1099): n is a, c, g, or t
  misc_feature (1104)..(1104): n is a, c, g, or t
  misc_feature (1111)..(1113): n is a, c, g, or t
  misc_feature (1120)..(1121): n is a, c, g, or t
  misc_feature (1125)..(1125): n is a, c, g, or t
  misc_feature (1127)..(1127): n is a, c, g, or t
  misc_feature (1136)..(1136): n is a, c, g, or t
  misc_feature (1148)..(1149): n is a, c, g, or t
  misc_feature (1154)..(1154): n is a, c, g, or t
  misc_feature (1165)..(1166): n is a, c, g, or t
  misc_feature (1171)..(1171): n is a, c, g, or t
  misc_feature (1174)..(1174): n is a, c, g, or t
  misc_feature (1178)..(1178): n is a, c, g, or t
  misc_feature (1184)..(1184): n is a, c, g, or t
  misc_feature (1191)..(1191): n is a, c, g, or t
  misc_feature (1207)..(1207): n is a, c, g, or t
  misc_feature (1209)..(1209): n is a, c, g, or t
  misc_feature (1219)..(1219): n is a, c, g, or t
  misc_feature (1227)..(1227): n is a, c, g, or t
  misc_feature (1237)..(1237): n is a, c, g, or t
  misc_feature (1240)..(1241): n is a, c, g, or t
  misc_feature (1258)..(1258): n is a, c, g, or t
  misc_feature (1262)..(1262): n is a, c, g, or t
  misc_feature (1273)..(1273): n is a, c, g, or t
  misc_feature (1277)..(1277): n is a, c, g, or t
  misc_feature (1280)..(1280): n is a, c, g, or t
  misc_feature (1283)..(1283): n is a, c, g, or t
  misc_feature (1285)..(1285): n is a, c, g, or t
  misc_feature (1287)..(1287): n is a, c, g, or t
  misc_feature (1291)..(1291): n is a, c, g, or t
  misc_feature (1295)..(1295): n is a, c, g, or t
  misc_feature (1297)..(1299): n is a, c, g, or t
  misc_feature (1301)..(1302): n is a, c, g, or t
  misc_feature (1304)..(1306): n is a, c, g, or t
  misc_feature (1309)..(1309): n is a, c, g, or t
  misc_feature (1311)..(1311): n is a, c, g, or t
  misc_feature (1314)..(1316): n is a, c, g, or t
  misc_feature (1318)..(1318): n is a, c, g, or t
  misc_feature (1322)..(1325): n is a, c, g, or t
attagagaaattactatgagaggatcgcatcaccatcaccatcacggatcctatttaggtgacactatagaatcgtcgacccacgcgtccgctggcaataaagtttttggtgccctgaagggagctgtggatggaggcttgtctatccctcacagtaccaaacgattccctggttatgattctgaaagcaaggaatttaatgcagaagtacatcggaagcacatcatgggccagaatgttgcagattacatgcgctacttaatggaagaagatgaagatgcttacaagaaacagttctctcaatacataaagaacagcgtaactccagacatgatggaggagatgtataagaaagctcatgctgctatacgagagaatccagtctatgaaaagaagcccaagaaagaagttaaaaagaagaggtggaaccgtcccaaaatgtcccttgctcagaagaaggatcgggtagctcaaaagaaggcaagcttcctcagagctcaggagcgggctgctgagagctaaacccagcaattttctatgattttttcagatatagataataaacttatgaacagcaaaaaaaaaaaaaaaaaagggcggccgctccctatagtgagtcgtattaagcttaattagctgagcttggactcctgttgatagatccagtaatgacctcagaactccatctggatttgttcagaacgctcggttgccgccgggcgttttttattggtgagaatccaagctagcttggcgagattttcaggagctaaggaagctaaaatggagaaaaaaatcactggatataccaccgttgatatatcccaatggcatcgtaaagaacattttgaggcatttcagtcagttgctcaatgtacctataaccagaccgttcagctggatattacggcctttttaaagaccgtaaagaaaaataagcncaagttttatccggcctttttcnnttcttgcccncctgatgaatgctcntccggaattcctatggcatgaanacggtganctggnganatggganannntccccctgtnccccgttttccngaacnaactgaacgtttcctcccntggaggaannccncgacnattccgnnntttccannattntncccaaaagngggggttacggnnaaacntgcctattccnnaaggnttntggnaaaatnttttccnccccccaccccggggnanttcccctttngattaacnggccaaaggnaannttcccccccctttcccngggnaaaattacccngggnaanggntnancccngggnannngnncnnnccntnggnnncncccnnnnc

SEQ ID NO: 37 - DNA, 1334 bp, Homo Sapiens
  misc_feature (856)..(856): n is a, c, g, or t
  misc_feature (863)..(863): n is a, c, g, or t
  misc_feature (875)..(875): n is a, c, g, or t
  misc_feature (877)..(877): n is a, c, g, or t
  misc_feature (892)..(892): n is a, c, g, or t
  misc_feature (915)..(915): n is a, c, g, or t
  misc_feature (920)..(920): n is a, c, g, or t
  misc_feature (925)..(925): n is a, c, g, or t
  misc_feature (936)..(936): n is a, c, g, or t
  misc_feature (938)..(938): n is a, c, g, or t
  misc_feature (966)..(966): n is a, c, g, or t
  misc_feature (982)..(982): n is a, c, g, or t
  misc_feature (995)..(995): n is a, c, g, or t
  misc_feature (999)..(999): n is a, c, g, or t
  misc_feature (1003)..(1003): n is a, c, g, or t
  misc_feature (1017)..(1017): n is a, c, g, or t
  misc_feature (1034)..(1034): n is a, c, g, or t
  misc_feature (1047)..(1047): n is a, c, g, or t
  misc_feature (1081)..(1081): n is a, c, g, or t
  misc_feature (1104)..(1105): n is a, c, g, or t
  misc_feature (1114)..(1114): n is a, c, g, or t
  misc_feature (1117)..(1117): n is a, c, g, or t
  misc_feature (1119)..(1119): n is a, c, g, or t
  misc_feature (1121)..(1121): n is a, c, g, or t
  misc_feature (1136)..(1136): n is a, c, g, or t
  misc_feature (1138)..(1138): n is a, c, g, or t
  misc_feature (1148)..(1148): n is a, c, g, or t
  misc_feature (1162)..(1163): n is a, c, g, or t
  misc_feature (1170)..(1170): n is a, c, g, or t
  misc_feature (1174)..(1174): n is a, c, g, or t
  misc_feature (1177)..(1177): n is a, c, g, or t
  misc_feature (1184)..(1184): n is a, c, g, or t
  misc_feature (1194)..(1196): n is a, c, g, or t
  misc_feature (1209)..(1209): n is a, c, g, or t
  misc_feature (1217)..(1217): n is a, c, g, or t
  misc_feature (1229)..(1233): n is a, c, g, or t
  misc_feature (1241)..(1241): n is a, c, g, or t
  misc_feature (1246)..(1247): n is a, c, g, or t
  misc_feature (1258)..(1259): n is a, c, g, or t
  misc_feature (1262)..(1262): n is a, c, g, or t
  misc_feature (1272)..(1272): n is a, c, g, or t
  misc_feature (1277)..(1277): n is a, c, g, or t
  misc_feature (1279)..(1279): n is a, c, g, or t
  misc_feature (1287)..(1289): n is a, c, g, or t
  misc_feature (1292)..(1297): n is a, c, g, or t
  misc_feature (1300)..(1306): n is a, c, g, or t
  misc_feature (1315)..(1316): n is a, c, g, or t
  misc_feature (1323)..(1325): n is a, c, g, or t
  misc_feature (1330)..(1330): n is a, c, g, or t
  misc_feature (1332)..(1334): n is a, c, g, or t
tagagaaattactatgagaggatcgcatcaccatcaccatcacggatcctatttaggtgacactatagaatcgtcgacccacgcgtccgcccacgcgtccggccggccgggtcccctcgggtgctatgaagatgccgaccatggtgcccctgagcctcctgagcgtgccccagctgagcggagccggcgggggagggggagaggcgggtgccggcggcggcgctgccgcagtggccgccggtggcgtggtgaccacgaccgcctcggggaagcgcatccggaagaaccatgcctgcgagatgtgtggcaaggccttccgcgacgtctaccacctgaaccgacacaagctgtcgcactcggacgagaagccctaccagtgcccggtgtgccagcagcgcttcaagcgcaaggaccgcatgagctaccacgtgcgctcacatgacggcgctgtgcacaagccctacaactgctcccactgtggcaagagcttctcccggccggatcacctcaacagtcacgtcagacaagtgcactcaacagaacggcccttcaaatgtgagaaatgtgaggcagctttcgccacgaaggatcggctgcgggcgcacacagtacgacacgaggagaaagtgccatgtcacgtgtgtggcaagatgctgagctcggcttatatttcggaccacatgaaggtgcacagccagggtcctcaccatgtctgtgagctctgcaacaaaggtactggtgaggtttgtccaatggcggcggcagcggcagcggcggcagcggcagcagcggcagcagtagcagcccctcccacagctgtgggctccctctcgggggcggaaggggtgcctgtganctctcanccacttcctccnancctggtgagctccanttggttgcgggggaaagggaaantggantaaantcccttggtananctcctctccccctcttttccacaactcntatttcctacaaccanggagcctccaaangaangagnaaaatgttttttanggaattcctagttttangatttttttctgntctctttaaaaactgacccaaaaaactgtccctngttgtttaatcctgaaaaaaccnngctttttcnagnantngaactttcctgaagncntttttcttcntcttccctgtttgnnccctccnggantgnttttttntttttttttnnnggaggaaaaaaangggtaaanttccaaaaaaannnnnttttaggnaaaanncccattttttnnggngggggggggnccccncntttttttnnnaannnnnnaannnnnnnaaaattttnnggggggnnnttttntnnn

SEQ ID NO: 38 - DNA, 783 bp, Homo Sapiens
  misc_feature (783)..(783): n is a, c, g, or t
tagagaaattactatgagaggatcgcatcaccatcaccatcacggatcctatttaggtgacactatagaatcgtcgacccacgcgtccgtggagagcgagcagttcctgacggagctgaccagacttttccagaagtgccggacgtcgggcagcgtctatatcaccttgaagaagtatgacggtcgaaccaaacccattccaaagaaaggtactgtggagggctttgagcccgcagacaacaagtgtctgttacgagctaccgatgggaagaagaagatcagcactgtggtgagctccaaggaagtgaataagtttcagatggcttattcaaacctccttagagctaacatggatgggctgaagaagagagacaaaaagaacaaaactaagaagaccaaagcagcagcagcagcagcagcagcagcacctgccgcagcagcaacagcagcaacaacagcagcaacaacagcagcaacagcagcacagtaaagggcatacatttcctgctttcaccaattaaccactgaattgctattttttccttttggccagatagctaggtttctggttcccccacagtaggtgttttcacataagattagggtccttttggaaagaatagttgcagtgtttataggatagttgtggtaagaatctagtttattttgcatttggctaattggtctgtgctgcatggttatatactcctggattatagattaaaagtctctgtagacatctctgtgaagagcaagctatcattaaacatgtctgtttaaaan

SEQ ID NO: 39 - DNA, 1361 bp, Homo Sapiens
  misc_feature (887)..(887): n is a, c, g, or t
  misc_feature (903)..(903): n is a, c, g, or t
  misc_feature (951)..(953): n is a, c, g, or t
  misc_feature (956)..(956): n is a, c, g, or t
  misc_feature (965)..(1000): n is a, c, g, or t
  misc_feature (1004)..(1004): n is a, c, g, or t
  misc_feature (1009)..(1009): n is a, c, g, or t
  misc_feature (1013)..(1013): n is a, c, g, or t
  misc_feature (1015)..(1015): n is a, c, g, or t
  misc_feature (1020)..(1020): n is a, c, g, or t
  misc_feature (1030)..(1031): n is a, c, g, or t
  misc_feature (1034)..(1034): n is a, c, g, or t
  misc_feature (1047)..(1047): n is a, c, g, or t
  misc_feature (1051)..(1052): n is a, c, g, or t
  misc_feature (1058)..(1058): n is a, c, g, or t
  misc_feature (1062)..(1062): n is a, c, g, or t
  misc_feature (1064)..(1065): n is a, c, g, or t
  misc_feature (1068)..(1068): n is a, c, g, or t
  misc_feature (1078)..(1078): n is a, c, g, or t
  misc_feature (1080)..(1080): n is a, c, g, or t
  misc_feature (1082)..(1083): n is a, c, g, or t
  misc_feature (1088)..(1088): n is a, c, g, or t
  misc_feature (1093)..(1093): n is a, c, g, or t
  misc_feature (1100)..(1100): n is a, c, g, or t
  misc_feature (1110)..(1110): n is a, c, g, or t
  misc_feature (1118)..(1118): n is a, c, g, or t
  misc_feature (1127)..(1127): n is a, c, g, or t
  misc_feature (1141)..(1141): n is a, c, g, or t
  misc_feature (1149)..(1149): n is a, c, g, or t
  misc_feature (1152)..(1153): n is a, c, g, or t
  misc_feature (1155)..(1155): n is a, c, g, or t
  misc_feature (1174)..(1174): n is a, c, g, or t
  misc_feature (1178)..(1178): n is a, c, g, or t
  misc_feature (1180)..(1180): n is a, c, g, or t
  misc_feature (1183)..(1183): n is a, c, g, or t
  misc_feature (1187)..(1187): n is a, c, g, or t
  misc_feature (1193)..(1193): n is a, c, g, or t
  misc_feature (1206)..(1207): n is a, c, g, or t
  misc_feature (1210)..(1210): n is a, c, g, or t
  misc_feature (1226)..(1226): n is a, c, g, or t
  misc_feature (1228)..(1228): n is a, c, g, or t
  misc_feature (1231)..(1232): n is a, c, g, or t
  misc_feature (1235)..(1235): n is a, c, g, or t
  misc_feature (1239)..(1240): n is a, c, g, or t
  misc_feature (1247)..(1247): n is a, c, g, or t
  misc_feature (1255)..(1255): n is a, c, g, or t
  misc_feature (1261)..(1261): n is a, c, g, or t
  misc_feature (1263)..(1263): n is a, c, g, or t
  misc_feature (1271)..(1271): n is a, c, g, or t
  misc_feature (1274)..(1274): n is a, c, g, or t
  misc_feature (1278)..(1278): n is a, c, g, or t
  misc_feature (1292)..(1292): n is a, c, g, or t
  misc_feature (1298)..(1298): n is a, c, g, or t
  misc_feature (1340)..(1341): n is a, c, g, or t
  misc_feature (1350)..(1351): n is a, c, g, or t
  misc_feature (1357)..(1357): n is a, c, g, or t
tagagaaaattactatgagaggatcgcatcaccatcaccatcacggatcctatttaggtgacactatagaatcgtcgacccacgcgtccgaaaaagcatccaatcccgtggaggttggcatccaggtcacgccagaggatgacgattgtttatcaacgtcatctagaggaatttgccccaaacaggaacacatagcagataaacttctgcactggaggggcctctcctcccctcgttctgcacatggagctctaatccccacgcctgggatgagtgcagaatatgccccgcagggtatttgtaaagatgagcccagcagctacacatgtacaacttgcaaacagccattcaccagtgcatggtttctcttgcaacacgcacagaacactcatggattaagaatctacttagaaagcgaacacggaagtcccctgaccccgcgggttcttcacacacccccattcggcgtagtacccagagagctcaagatgtgtggcagttttcggatggaagctcgagagcccttaagttctgagaaaatttgaagcccccaggggtggggtggacgcgtgccgcccagtcgacgtcagcgtggtctgtcatcctgctagtttgtgatgttttctgacagtagcctccaagaagccgttgtgcgaagacagagtcctgcagagtccttccagcctaggcctgcagcgccattttatttatattttttaataaaaagtaaaaacaaaaaaacagacccacattggaacagtgaatcagtcccatagagagggcccgtggaccatcgctgtcatgagtgatgccctggcccttctgaaaccagccaacctaattacctgtattgtggaaatgcgcatgagtcccaaccccttgtttcnatacattctatgttgncttttaaaagtgtgcttaacattgacacaataaatgttggagcttttnnnaanaaaaaaaannnnnnnnnnnnnnnnnnnnnnnnnnnnnnnnnnnnaaanggggncccncnccctnataggggggnngantaaacttaattanctgnncttggnaacncnngtngaaaattccngnanngaccnccaanctccctntggatttttnaaaaaccncggttgccnccgggggttttttnttgggggnaanncnagcctgctggggaaatttncggncntangganctaaanggaaaaaaaaccnnggnaaacccccgtgtaaantnccnnggnctcnnaaaaaantttggggntttccncngtgcccanggnccanaaccaaacgttccngggaanagccttttaaacccaaaaaaaaaacagtttttcggccttttnnttttgcccnnggaaangccc

SEQ ID NO: 40 - DNA, 1327 bp, Homo Sapiens
  misc_feature (746)..(746): n is a, c, g, or t
  misc_feature (847)..(847): n is a, c, g, or t
  misc_feature (864)..(864): n is a, c, g, or t
  misc_feature (884)..(884): n is a, c, g, or t
  misc_feature (894)..(894): n is a, c, g, or t
  misc_feature (913)..(913): n is a, c, g, or t
  misc_feature (930)..(930): n is a, c, g, or t
  misc_feature (946)..(946): n is a, c, g, or t
  misc_feature (948)..(948): n is a, c, g, or t
  misc_feature (969)..(969): n is a, c, g, or t
  misc_feature (983)..(983): n is a, c, g, or t
  misc_feature (997)..(997): n is a, c, g, or t
  misc_feature (1000)..(1000): n is a, c, g, or t
  misc_feature (1014)..(1014): n is a, c, g, or t
  misc_feature (1019)..(1019): n is a, c, g, or t
  misc_feature (1028)..(1028): n is a, c, g, or t
  misc_feature (1030)..(1030): n is a, c, g, or t
  misc_feature (1034)..(1034): n is a, c, g, or t
  misc_feature (1037)..(1037): n is a, c, g, or t
  misc_feature (1045)..(1045): n is a, c, g, or t
  misc_feature (1047)..(1047): n is a, c, g, or t
  misc_feature (1050)..(1050): n is a, c, g, or t
  misc_feature (1061)..(1061): n is a, c, g, or t
  misc_feature (1075)..(1075): n is a, c, g, or t
  misc_feature (1080)..(1080): n is a, c, g, or t
  misc_feature (1091)..(1091): n is a, c, g, or t
  misc_feature (1107)..(1107): n is a, c, g, or t
  misc_feature (1109)..(1109): n is a, c, g, or t
  misc_feature (1123)..(1123): n is a, c, g, or t
  misc_feature (1141)..(1141): n is a, c, g, or t
  misc_feature (1144)..(1144): n is a, c, g, or t
  misc_feature (1149)..(1149): n is a, c, g, or t
  misc_feature (1159)..(1160): n is a, c, g, or t
  misc_feature (1162)..(1162): n is a, c, g, or t
  misc_feature (1178)..(1178): n is a, c, g, or t
  misc_feature (1189)..(1189): n is a, c, g, or t
  misc_feature (1195)..(1195): n is a, c, g, or t
  misc_feature (1205)..(1205): n is a, c, g, or t
  misc_feature (1209)..(1209): n is a, c, g, or t
  misc_feature (1214)..(1214): n is a, c, g, or t
  misc_feature (1219)..(1219): n is a, c, g, or t
  misc_feature (1223)..(1223): n is a, c, g, or t
  misc_feature (1233)..(1233): n is a, c, g, or t
  misc_feature (1235)..(1235): n is a, c, g, or t
  misc_feature (1237)..(1237): n is a, c, g, or t
  misc_feature (1240)..(1240): n is a, c, g, or t
  misc_feature (1246)..(1248): n is a, c, g, or t
  misc_feature (1250)..(1250): n is a, c, g, or t
  misc_feature (1253)..(1254): n is a, c, g, or t
  misc_feature (1258)..(1259): n is a, c, g, or t
  misc_feature (1263)..(1266): n is a, c, g, or t
  misc_feature (1269)..(1270): n is a, c, g, or t
  misc_feature (1273)..(1275): n is a, c, g, or t
  misc_feature (1277)..(1277): n is a, c, g, or t
  misc_feature (1282)..(1286): n is a, c, g, or t
  misc_feature (1293)..(1293): n is a, c, g, or t
  misc_feature (1298)..(1300): n is a, c, g, or t
  misc_feature (1304)..(1304): n is a, c, g, or t
  misc_feature (1310)..(1311): n is a, c, g, or t
  misc_feature (1318)..(1318): n is a, c, g, or t
  misc_feature (1322)..(1323): n is a, c, g, or t
agaaattactatgagaggatcgcatcaccatcaccatcacggatcctatttaggtgacactatagaatcgtcgacccacgcgtccgttcctgcctctgccagaacggagggacctgtgaccctgtctcaggccactgtgcgtgcccagagggctgggccggcctggcctgtgagaaggagtgcctcccccgggacgtcagagctggctgccggcacagcggcggttgcctcaacgggggcctgtgtgacccgcacacgggccgctgcctctgcccagccggctggactggggacaagtgtcagagcccctgcctgcggggctggtttggagaggcctgtgcccagcgctgcagctgcccgcctggcgctgcctgccaccacgtcactggggcctgccgctgtccccctggcttcactggctccggctgcgagcagggatgtccgcccgggcggtatgggccaggctgtgaacagctgtgtgggtgtctcaacgggggctcctgtgatgcggccacgggggcctgccgctgccccactgggttcctcgggacggactgcaacctcacctgtccgcagggccgcttcggccccaactgcacccacgtgtgtgggtgtgggcagggggcggcctgcgaccctgtgaccggcacctgcctctgccccccggggagagccggcgtccgctgtgagcgaggctgcccccagaaccggtttggcgtgggctgcgagcacacctgctcctgcanaaatgggggcctgtgccacgccagcaacggcagctgctcctgtggcctgggctggacggggcggcactgcgagctggcctgtccccctgggcgctacgganccgcctgcaatctggantgctcctgccacaacaacancacgtgtgancctgcaacgggcacctgcngctgcggccccggcttntatggcaaggcctgcnancaccctgtcccctggcttcanggggctgctgccanggttttgctgttgnaanatgaaccccctgcnacccnataatggcnangctntgncctgcggntncanggcaatttggnaaaagggttgaacnagttnatttgaaaagnttccccaaccctttantntaaaggggggcacntggaacctttaacggttnttnctttnccccaagggnntnaaaaaccttttaactntaattaaaaanggccantttggccccnttcnccccnatttnaatncggggggggntnanatnaacctnnntnggnnattnntttnnnnaannaannngnccccnnnnnaaaaggnccctnnncccnaaaaanntttttangggnngggg

SEQ ID NO: 41 - DNA, 1384 bp, Homo Sapiens
  misc_feature (848)..(848): n is a, c, g, or t
  misc_feature (856)..(856): n is a, c, g, or t
  misc_feature (878)..(878): n is a, c, g, or t
  misc_feature (894)..(894): n is a, c, g, or t
  misc_feature (901)..(902): n is a, c, g, or t
  misc_feature (923)..(923): n is a, c, g, or t
  misc_feature (925)..(925): n is a, c, g, or t
  misc_feature (933)..(933): n is a, c, g, or t
  misc_feature (938)..(938): n is a, c, g, or t
  misc_feature (952)..(952): n is a, c, g, or t
  misc_feature (957)..(957): n is a, c, g, or t
  misc_feature (966)..(966): n is a, c, g, or t
  misc_feature (988)..(989): n is a, c, g, or t
  misc_feature (995)..(995): n is a, c, g, or t
  misc_feature (999)..(1000): n is a, c, g, or t
  misc_feature (1003)..(1003): n is a, c, g, or t
  misc_feature (1006)..(1006): n is a, c, g, or t
  misc_feature (1010)..(1010): n is a, c, g, or t
  misc_feature (1015)..(1015): n is a, c, g, or t
  misc_feature (1024)..(1024): n is a, c, g, or t
  misc_feature (1037)..(1037): n is a, c, g, or t
  misc_feature (1041)..(1042): n is a, c, g, or t
  misc_feature (1045)..(1045): n is a, c, g, or t
  misc_feature (1059)..(1059): n is a, c, g, or t
  misc_feature (1061)..(1061): n is a, c, g, or t
  misc_feature (1065)..(1066): n is a, c, g, or t
  misc_feature (1068)..(1068): n is a, c, g, or t
  misc_feature (1072)..(1072): n is a, c, g, or t
  misc_feature (1074)..(1076): n is a, c, g, or t
  misc_feature (1084)..(1084): n is a, c, g, or t
  misc_feature (1086)..(1086): n is a, c, g, or t
  misc_feature (1090)..(1097): n is a, c, g, or t
  misc_feature (1099)..(1100): n is a, c, g, or t
  misc_feature (1102)..(1102): n is a, c, g, or t
  misc_feature (1104)..(1104): n is a, c, g, or t
  misc_feature (1106)..(1110): n is a, c, g, or t
  misc_feature (1112)..(1116): n is a, c, g, or t
  misc_feature (1118)..(1134): n is a, c, g, or t
  misc_feature (1137)..(1140): n is a, c, g, or t
  misc_feature (1142)..(1147): n is a, c, g, or t
  misc_feature (1149)..(1166): n is a, c, g, or t
  misc_feature (1168)..(1170): n is a, c, g, or t
  misc_feature (1172)..(1177): n is a, c, g, or t
  misc_feature (1179)..(1181): n is a, c, g, or t
  misc_feature (1183)..(1185): n is a, c, g, or t
  misc_feature (1187)..(1190): n is a, c, g, or t
  misc_feature (1192)..(1199): n is a, c, g, or t
  misc_feature (1201)..(1201): n is a, c, g, or t
  misc_feature (1206)..(1207): n is a, c, g, or t
  misc_feature (1209)..(1212): n is a, c, g, or t
  misc_feature (1214)..(1215): n is a, c, g, or t
  misc_feature (1217)..(1217): n is a, c, g, or t
  misc_feature (1221)..(1222): n is a, c, g, or t
  misc_feature (1224)..(1231): n is a, c, g, or t
  misc_feature (1234)..(1244): n is a, c, g, or t
  misc_feature (1246)..(1248): n is a, c, g, or t
  misc_feature (1250)..(1250): n is a, c, g, or t
  misc_feature (1253)..(1253): n is a, c, g, or t
  misc_feature (1255)..(1257): n is a, c, g, or t
  misc_feature (1259)..(1259): n is a, c, g, or t
  misc_feature (1261)..(1261): n is a, c, g, or t
  misc_feature (1263)..(1263): n is a, c, g, or t
  misc_feature (1266)..(1272): n is a, c, g, or t
  misc_feature (1275)..(1281): n is a, c, g, or t
  misc_feature (1283)..(1283): n is a, c, g, or t
  misc_feature (1285)..(1290): n is a, c, g, or t
  misc_feature (1292)..(1292): n is a, c, g, or t
  misc_feature (1294)..(1302): n is a, c, g, or t
  misc_feature (1304)..(1308): n is a, c, g, or t
  misc_feature (1310)..(1316): n is a, c, g, or t
  misc_feature (1319)..(1319): n is a, c, g, or t
  misc_feature (1321)..(1323): n is a, c, g, or t
  misc_feature (1325)..(1328): n is a, c, g, or t
  misc_feature (1330)..(1332): n is a, c, g, or t
  misc_feature (1334)..(1338): n is a, c, g, or t
  misc_feature (1340)..(1340): n is a, c, g, or t
  misc_feature (1343)..(1343): n is a, c, g, or t
  misc_feature (1345)..(1348): n is a, c, g, or t
  misc_feature (1350)..(1351): n is a, c, g, or t
  misc_feature (1353)..(1365): n is a, c, g, or t
  misc_feature (1367)..(1367): n is a, c, g, or t
  misc_feature (1369)..(1370): n is a, c, g, or t
  misc_feature (1372)..(1382): n is a, c, g, or t
  misc_feature (1384)..(1384): n is a, c, g, or t
attagagagattactatgagaggatcgcatcaccatcaccatcacggatcctatttaggtgacactatagaatcgtcgacccacgcgtccggtcaccgggcgagttacctcccgcagccgcagccgccgtgctcagcgcgagccccggagcccttgagcgcgaggcgcggagcccccggagcccccaaaccgcagacacatccccgcgccccagagccccggcctgcgcgcccagccgggcccgcgcgatgccctcagaccggcctttcaagcagcggcggagcttcgccgaccgctgtaaggaggtacagcagatccgcgaccagcaccccagcaaaatcccggtgatcatcgagcgctacaagggtgagaagcagctgcccgtcctggacaagaccaagtttttggtcccggaccatgtcaacatgagcgagttggtcaagatcatccggcgccgcctgcagctgaaccccacgcaggccttcttcctgctggtgaaccagcacagcatggtgagtgtgtccacgcccatcgcggacatctacgagcaggagaaagacgaggacggcttcctctatatggtctacgcctcccaggaaaccttcggcttctgagccagcagtaggggggctcggcctgggagtcggggggccccggtcaggccctgcccagagagctcctggttcctgaactgagctgcctctaccgtggtgggctgggcaggcatgtgcccccctagtcagagggcaccaacccacctactctgcccctgggtggatcctgggccggtcgtgttagggttgtcccctctgggtgctggctggtgggatgggggaaaggttggggancaactccnagcacccctgctgtgtgggttnaatcttttttttaagnccctgcnngtctgccccatttggcccctnanccaacccnaaggntttgcccaacggcntggancttggccancccttgaaaaaatggccctggnntccccngccnnttngtntccngtggngaaaggatntggggtcattgtncctnnggnaaaaaaaaaattgntnaggnntngctngnnnaaaaaaananaaannnnnnnnannananannnnnannnnnannnnnnnnnnnnnnnnnaannnnannnnnnannnnnnnnnnnnnnnnnnannnannnnnnannnannntnnnntnnnnnnnnantaaannannnnannanatannannnnnnnnaannnnnnnnnnnannnanatnannnantnanaannnnnnntannnnnnnanannnnnntngnnnnnnnnnannnnntnnnnnnnttnannnannnnannnannnnnanaanannnnannannnnnnnnnnnnnantnnannnnnnnnnnntn

SEQ ID NO: 42 - DNA, 1200 bp, Homo Sapiens
  misc_feature (759)..(759): n is a, c, g, or t
  misc_feature (781)..(781): n is a, c, g, or t
  misc_feature (932)..(932): n is a, c, g, or t
  misc_feature (985)..(986): n is a, c, g, or t
  misc_feature (988)..(988): n is a, c, g, or t
  misc_feature (1013)..(1013): n is a, c, g, or t
  misc_feature (1023)..(1023): n is a, c, g, or t
  misc_feature (1026)..(1026): n is a, c, g, or t
  misc_feature (1049)..(1049): n is a, c, g, or t
  misc_feature (1055)..(1055): n is a, c, g, or t
  misc_feature (1060)..(1060): n is a, c, g, or t
  misc_feature (1069)..(1069): n is a, c, g, or t
  misc_feature (1072)..(1072): n is a, c, g, or t
  misc_feature (1091)..(1091): n is a, c, g, or t
  misc_feature (1093)..(1093): n is a, c, g, or t
  misc_feature (1101)..(1101): n is a, c, g, or t
  misc_feature (1107)..(1107): n is a, c, g, or t
  misc_feature (1124)..(1124): n is a, c, g, or t
  misc_feature (1130)..(1130): n is a, c, g, or t
  misc_feature (1143)..(1143): n is a, c, g, or t
  misc_feature (1151)..(1151): n is a, c, g, or t
  misc_feature (1156)..(1156): n is a, c, g, or t
  misc_feature (1159)..(1159): n is a, c, g, or t
  misc_feature (1167)..(1167): n is a, c, g, or t
  misc_feature (1178)..(1178): n is a, c, g, or t
  misc_feature (1190)..(1190): n is a, c, g, or t
tagagagattaactatgagaggatcgcatcaccatcaccatcacggatcctatttaggtgacactatagaatcgtcgacccacgcgtccgcccacgcgtccgggagcacctgcacctggagtctacccagggccacccagcggccctggggcctacccatcttctggacagccaagtgccaccggagcctaccctgccactggcccctatggcgcccctgctgggccactgattgtgccttataacctgcctttgcctgggggagtggtgcctcgcatgctgataacaattctgggcacggtgaagcccaatgcaaacagaattgctttagatttccaaagagggaatgatgttgccttccactttaacccacgcttcaatgagaacaacaggagagtcattgtttgcaatacaaagctggataataactggggaagggaagaaagacagtcggttttcccatttgaaagtgggaaaccattcaaaatacaagtactggttgaacctgaccacttcaaggttgcagtgaatgatgctcacttgttgcagtacaatcatcgggttaaaaaactcaatgaaatcagcaaactgggaatttctggtgacatagacctcaccagtgcttcatataccatgatataatctgaaaggggcagattaaaaaaaaaaaaaaaagggcggccgctccctatagtgagtcgtattaagcttaattagctgagcttggactcctgttgatagatccagtaatgacctcanaactccatctggatttgttcanaacgctcggttgccgccgggcgttttttattggtgagaatccaagctagcttggcgagattttcaggagctaaggaagctaaaatggaaaaaaaaaatcactggatataccaccgttgatatatcccaatggcatcgtaaagaacattttngaggcatttcagtcagttgctcaatgtacctataaccaaaccgttcactgganntnacggccttttttaaaaaccgtaaanaaaaaaaaancanaagttttacccggcctttattcnattctngcccncctgagaangcncatccggaatttctatggnantgaaaaangggganctggggaaatgggaaanggttcncccttgttacccngttttccnagaanaantgaaaacntttttcccctntggaggaaaacnccaaaaattc

SEQ ID NO: 43 - DNA, 1429 bp, Homo Sapiens
  misc_feature (585)..(585): n is a, c, g, or t
  misc_feature (587)..(587): n is a, c, g, or t
  misc_feature (626)..(626): n is a, c, g, or t
  misc_feature (647)..(647): n is a, c, g, or t
  misc_feature (683)..(683): n is a, c, g, or t
  misc_feature (692)..(692): n is a, c, g, or t
  misc_feature (716)..(716): n is a, c, g, or t
  misc_feature (723)..(723): n is a, c, g, or t
  misc_feature (736)..(736): n is a, c, g, or t
  misc_feature (740)..(740): n is a, c, g, or t
  misc_feature (742)..(743): n is a, c, g, or t
  misc_feature (749)..(750): n is a, c, g, or t
  misc_feature (758)..(758): n is a, c, g, or t
  misc_feature (762)..(762): n is a, c, g, or t
  misc_feature (777)..(777): n is a, c, g, or t
  misc_feature (783)..(783): n is a, c, g, or t
  misc_feature (793)..(793): n is a, c, g, or t
  misc_feature (795)..(795): n is a, c, g, or t
  misc_feature (797)..(797): n is a, c, g, or t
  misc_feature (800)..(800): n is a, c, g, or t
  misc_feature (807)..(807): n is a, c, g, or t
  misc_feature (809)..(809): n is a, c, g, or t
  misc_feature (823)..(823): n is a, c, g, or t
  misc_feature (828)..(829): n is a, c, g, or t
  misc_feature (833)..(833): n is a, c, g, or t
  misc_feature (844)..(844): n is a, c, g, or t
  misc_feature (850)..(850): n is a, c, g, or t
  misc_feature (853)..(853): n is a, c, g, or t
  misc_feature (859)..(859): n is a, c, g, or t
  misc_feature (869)..(870): n is a, c, g, or t
  misc_feature (876)..(876): n is a, c, g, or t
  misc_feature (879)..(879): n is a, c, g, or t
  misc_feature (883)..(883): n is a, c, g, or t
  misc_feature (887)..(887): n is a, c, g, or t
  misc_feature (903)..(903): n is a, c, g, or t
  misc_feature (919)..(920): n is a, c, g, or t
  misc_feature (923)..(923): n is a, c, g, or t
  misc_feature (927)..(927): n is a, c, g, or t
  misc_feature (929)..(929): n is a, c, g, or t
  misc_feature (934)..(934): n is a, c, g, or t
  misc_feature (942)..(942): n is a, c, g, or t
  misc_feature (944)..(944): n is a, c, g, or t
  misc_feature (961)..(961): n is a, c, g, or t
  misc_feature (971)..(972): n is a, c, g, or t
  misc_feature (985)..(985): n is a, c, g, or t
  misc_feature (1001)..(1001): n is a, c, g, or t
  misc_feature (1005)..(1005): n is a, c, g, or t
  misc_feature (1009)..(1009): n is a, c, g, or t
  misc_feature (1012)..(1013): n is a, c, g, or t
  misc_feature (1016)..(1017): n is a, c, g, or t
  misc_feature (1021)..(1021): n is a, c, g, or t
  misc_feature (1029)..(1029): n is a, c, g, or t
  misc_feature (1036)..(1036): n is a, c, g, or t
  misc_feature (1041)..(1041): n is a, c, g, or t
  misc_feature (1049)..(1049): n is a, c, g, or t
  misc_feature (1052)..(1052): n is a, c, g, or t
  misc_feature (1062)..(1062): n is a, c, g, or t
  misc_feature (1073)..(1075): n is a, c, g, or t
  misc_feature (1078)..(1078): n is a, c, g, or t
  misc_feature (1080)..(1080): n is a, c, g, or t
  misc_feature (1082)..(1083): n is a, c, g, or t
  misc_feature (1091)..(1091): n is a, c, g, or t
  misc_feature (1094)..(1094): n is a, c, g, or t
  misc_feature (1096)..(1096): n is a, c, g, or t
  misc_feature (1099)..(1099): n is a, c, g, or t
  misc_feature (1105)..(1105): n is a, c, g, or t
  misc_feature (1115)..(1115): n is a, c, g, or t
  misc_feature (1120)..(1120): n is a, c, g, or t
  misc_feature (1127)..(1127): n is a, c, g, or t
  misc_feature (1137)..(1138): n is a, c, g, or t
  misc_feature (1147)..(1147): n is a, c, g, or t
  misc_feature (1150)..(1150): n is a, c, g, or t
  misc_feature (1155)..(1155): n is a, c, g, or t
  misc_feature (1157)..(1158): n is a, c, g, or t
  misc_feature (1160)..(1160): n is a, c, g, or t
  misc_feature (1166)..(1166): n is a, c, g, or t
  misc_feature (1169)..(1169): n is a, c, g, or t
  misc_feature (1171)..(1172): n is a, c, g, or t
  misc_feature (1178)..(1178): n is a, c, g, or t
  misc_feature (1181)..(1181): n is a, c, g, or t
  misc_feature (1184)..(1184): n is a, c, g, or t
  misc_feature (1186)..(1186): n is a, c, g, or t
  misc_feature (1190)..(1191): n is a, c, g, or t
  misc_feature (1194)..(1194): n is a, c, g, or t
  misc_feature (1196)..(1196): n is a, c, g, or t
  misc_feature (1201)..(1203): n is a, c, g, or t
  misc_feature (1206)..(1206): n is a, c, g, or t
  misc_feature (1211)..(1211): n is a, c, g, or t
  misc_feature (1218)..(1219): n is a, c, g, or t
  misc_feature (1221)..(1222): n is a, c, g, or t
  misc_feature (1225)..(1225): n is a, c, g, or t
  misc_feature (1227)..(1228): n is a, c, g, or t
  misc_feature (1242)..(1242): n is a, c, g, or t
  misc_feature (1248)..(1248): n is a, c, g, or t
  misc_feature (1251)..(1251): n is a, c, g, or t
  misc_feature (1255)..(1255): n is a, c, g, or t
  misc_feature (1258)..(1259): n is a, c, g, or t
  misc_feature (1268)..(1269): n is a, c, g, or t
  misc_feature (1273)..(1273): n is a, c, g, or t
  misc_feature (1277)..(1277): n is a, c, g, or t
  misc_feature (1281)..(1281): n is a, c, g, or t
  misc_feature (1285)..(1285): n is a, c, g, or t
  misc_feature (1288)..(1288): n is a, c, g, or t
  misc_feature (1294)..(1294): n is a, c, g, or t
  misc_feature (1304)..(1304): n is a, c, g, or t
  misc_feature (1309)..(1309): n is a, c, g, or t
  misc_feature (1319)..(1320): n is a, c, g, or t
  misc_feature (1324)..(1324): n is a, c, g, or t
  misc_feature (1327)..(1328): n is a, c, g, or t
  misc_feature (1330)..(1330): n is a, c, g, or t
  misc_feature (1332)..(1332): n is a, c, g, or t
  misc_feature (1334)..(1334): n is a, c, g, or t
  misc_feature (1338)..(1338): n is a, c, g, or t
  misc_feature (1340)..(1341): n is a, c, g, or t
  misc_feature (1356)..(1356): n is a, c, g, or t
  misc_feature (1358)..(1358): n is a, c, g, or t
  misc_feature (1360)..(1362): n is a, c, g, or t
  misc_feature (1365)..(1365): n is a, c, g, or t
  misc_feature (1370)..(1371): n is a, c, g, or t
  misc_feature (1386)..(1386): n is a, c, g, or t
  misc_feature (1396)..(1396): n is a, c, g, or t
  misc_feature (1398)..(1398): n is a, c, g, or t
  misc_feature (1404)..(1404): n is a, c, g, or t
  misc_feature (1406)..(1407): n is a, c, g, or t
  misc_feature (1413)..(1414): n is a, c, g, or t
  misc_feature (1417)..(1418): n is a, c, g, or t
  misc_feature (1421)..(1421): n is a, c, g, or t
  misc_feature (1423)..(1423): n is a, c, g, or t
agagaaattactatgagaggatcgcatcaccatcaccatcacggatcctatttaggtgacactatagaatcgtcgacccacgcgtccggaagaagcaccgttgtaaatgctgctccatcatgtgagccggcccccgagacccggggggctgtggagggggcagcccggaccacgccctcccggcgggagatcaccggtgtgcaggcacagccaggcgaggccacgtccggcccgccggggatccagcccggccaggagcccccggtcacaatgatcttcatgggttaccagaacgtggaggatgaggccgagaccaagaaggtgctgggccttcaagataccatcacggcggagctggtggtcatcgaagacgcggctgagcccaaggagcctgcaccacccaacggcagtgctgccgagcctcccacggaggccgcctccagggaagagaatcaggcggggcccgaggccaccaccagcgacccccaggacctcgacatgaagaagcaccgttgtaaatgctgctccatcatgtgagccggcccccgagaccccggcccccaccccacaccacagacacccacnancccggcccctcccggcgcctgcccaccctccacccacancctcacgggtccaggacttgncgtgttgttacatgttccttccgagtttttctttcnctggaaaanagggacaggggcccccaccccgtnaccaacnccccaacattccncccnanntaaaannccttgcantttntgtcctggttaaganaaaaancagggaaaanancncgnttttttncnaagaacaaaggacnccccnntgtnacggcagcttnacaaanttnggtttngtgcccaccnngttccntgncggntggnaacctgtaaaccttcnacgccggcccaagccnnccntgcnanccttntggacttntnccttttcctttttcttnttaagggaannccctccaaaaaantcttcgaaaacctggntggnttantannccnntttnaacccctntaaattnaagcntttttggnttncttgacaaanggttttccccnnnttntnannaatttggnggnangcnttcctntttttggganaaaanttttgtntgaagaaaannccttttgtntgnccccntnncntttggnccnannattaanaangantntggnnaangnttacnnnggnaattnccccccnngnnggncnnaacctctttttttntttaanggnaaantannttttttctnncctnatanaatnatanaanaaattnttttttaaanccccntgaaattttnntttntanntnanantatntnnccctctttttttttnantnnntanttttnnctaaaataatctatnttttatttancnactttnannttatannatnnttntntattct

SEQ ID NO: 44 - DNA, 1434 bp, Homo Sapiens
  misc_feature (429)..(429): n is a, c, g, or t
  misc_feature (733)..(733): n is a, c, g, or t
  misc_feature (777)..(777): n is a, c, g, or t
  misc_feature (791)..(791): n is a, c, g, or t
  misc_feature (812)..(812): n is a, c, g, or t
  misc_feature (824)..(824): n is a, c, g, or t
  misc_feature (833)..(833): n is a, c, g, or t
  misc_feature (839)..(839): n is a, c, g, or t
  misc_feature (843)..(843): n is a, c, g, or t
  misc_feature (845)..(845): n is a, c, g, or t
  misc_feature (855)..(855): n is a, c, g, or t
  misc_feature (857)..(857): n is a, c, g, or t
  misc_feature (880)..(880): n is a, c, g, or t
  misc_feature (888)..(889): n is a, c, g, or t
  misc_feature (892)..(892): n is a, c, g, or t
  misc_feature (901)..(902): n is a, c, g, or t
  misc_feature (907)..(907): n is a, c, g, or t
  misc_feature (915)..(915): n is a, c, g, or t
  misc_feature (919)..(919): n is a, c, g, or t
  misc_feature (933)..(933): n is a, c, g, or t
  misc_feature (938)..(938): n is a, c, g, or t
  misc_feature (948)..(948): n is a, c, g, or t
  misc_feature (958)..(958): n is a, c, g, or t
  misc_feature (965)..(965): n is a, c, g, or t
  misc_feature (987)..(987): n is a, c, g, or t
  misc_feature (992)..(992): n is a, c, g, or t
  misc_feature (1005)..(1005): n is a, c, g, or t
  misc_feature (1012)..(1012): n is a, c, g, or t
  misc_feature (1018)..(1019): n is a, c, g, or t
  misc_feature (1023)..(1023): n is a, c, g, or t
  misc_feature (1025)..(1025): n is a, c, g, or t
  misc_feature (1029)..(1029): n is a, c, g, or t
  misc_feature (1032)..(1032): n is a, c, g, or t
  misc_feature (1037)..(1037): n is a, c, g, or t
  misc_feature (1048)..(1048): n is a, c, g, or t
  misc_feature (1054)..(1054): n is a, c, g, or t
  misc_feature (1074)..(1074): n is a, c, g, or t
  misc_feature (1077)..(1077): n is a, c, g, or t
  misc_feature (1079)..(1079): n is a, c, g, or t
  misc_feature (1084)..(1084): n is a, c, g, or t
  misc_feature (1099)..(1099): n is a, c, g, or t
  misc_feature (1102)..(1102): n is a, c, g, or t
  misc_feature (1120)..(1121): n is a, c, g, or t
  misc_feature (1134)..(1134): n is a, c, g, or t
  misc_feature (1137)..(1137): n is a, c, g, or t
  misc_feature (1141)..(1142): n is a, c, g, or t
  misc_feature (1145)..(1147): n is a, c, g, or t
  misc_feature (1149)..(1150): n is a, c, g, or t
  misc_feature (1153)..(1153): n is a, c, g, or t
  misc_feature (1158)..(1158): n is a, c, g, or t
  misc_feature (1160)..(1160): n is a, c, g, or t
  misc_feature (1162)..(1163): n is a, c, g, or t
  misc_feature (1166)..(1166): n is a, c, g, or t
  misc_feature (1171)..(1171): n is a, c, g, or t
  misc_feature (1189)..(1189): n is a, c, g, or t
  misc_feature (1192)..(1192): n is a, c, g, or t
  misc_feature (1195)..(1195): n is a, c, g, or t
  misc_feature (1197)..(1200): n is a, c, g, or t
  misc_feature (1202)..(1204): n is a, c, g, or t
  misc_feature (1206)..(1206): n is a, c, g, or t
  misc_feature (1209)..(1209): n is a, c, g, or t
  misc_feature (1211)..(1212): n is a, c, g, or t
  misc_feature (1214)..(1215): n is a, c, g, or t
  misc_feature (1222)..(1222): n is a, c, g, or t
  misc_feature (1229)..(1229): n is a, c, g, or t
  misc_feature (1235)..(1235): n is a, c, g, or t
  misc_feature (1238)..(1238): n is a, c, g, or t
  misc_feature (1241)..(1241): n is a, c, g, or t
  misc_feature (1251)..(1251): n is a, c, g, or t
  misc_feature (1253)..(1254): n is a, c, g, or t
  misc_feature (1259)..(1259): n is a, c, g, or t
  misc_feature (1267)..(1267): n is a, c, g, or t
  misc_feature (1273)..(1273): n is a, c, g, or t
  misc_feature (1275)..(1275): n is a, c, g, or t
  misc_feature (1281)..(1281): n is a, c, g, or t
  misc_feature (1284)..(1284): n is a, c, g, or t
  misc_feature (1286)..(1287): n is a, c, g, or t
  misc_feature (1290)..(1290): n is a, c, g, or t
  misc_feature (1302)..(1304): n is a, c, g, or t
  misc_feature (1306)..(1306): n is a, c, g, or t
  misc_feature (1310)..(1312): n is a, c, g, or t
  misc_feature (1324)..(1324): n is a, c, g, or t
  misc_feature (1330)..(1330): n is a, c, g, or t
  misc_feature (1334)..(1334): n is a, c, g, or t
  misc_feature (1336)..(1338): n is a, c, g, or t
  misc_feature (1344)..(1344): n is a, c, g, or t
  misc_feature (1347)..(1347): n is a, c, g, or t
  misc_feature (1351)..(1353): n is a, c, g, or t
  misc_feature (1358)..(1359): n is a, c, g, or t
  misc_feature (1378)..(1380): n is a, c, g, or t
  misc_feature (1385)..(1386): n is a, c, g, or t
  misc_feature (1391)..(1393): n is a, c, g, or t
  misc_feature (1395)..(1395): n is a, c, g, or t
  misc_feature (1399)..(1399): n is a, c, g, or t
  misc_feature (1414)..(1414): n is a, c, g, or t
  misc_feature (1421)..(1424): n is a, c, g, or t
  misc_feature (1426)..(1427): n is a, c, g, or t
  misc_feature (1432)..(1432): n is a, c, g, or t
  misc_feature (1434)..(1434): n is a, c, g, or t
tagagagattactatgagaggatcgcatcaccatcaccatcacggatcctatttaggtgacactatagaatcgtcgacccacgcgtccgcccgccccgcccgaaggcgcctcgccaggggacagcgcccggcagaaactggaggagacaagcgcgtgcctggccgcggcgctgcaggcggtggaggagaagatccggcaggaggacgcgcagggcccgcgcgactcggcggcggaaaagagcactggcagcatcctggacgacatcggcagcatgttcgacgacctggccgaccagctggatgccatgctggagtgaacgccgcctggccgggccctcccgcgccgcccgggccctccccgcacactgacctatacctcaggatgggcgcgtctgggcgcggcgcgagcggccgggcagggccctgcanaagcacaactccggcccctggacccgggccggggcgcccaccggggaccgcctggccgggggctccaagggctctaggcagaccctgcgcccgcgggtcctccccacctgctgctccccgtgcaatacctgctgggcctcctgcccgcgcgggaggggagggcgccccgggaccagggatggggcagcgcacaggcccgggcccagcacagaactgcccatcgggacgcccggccagccgctcgggcgcagcacaagggacaggggaccaaggtcagggcccccctgccccaccgcacccccanaatataagctatcaagagtattaatttattgggaatgagctgangcggatttccccanaaaaaacaaaaaaggtataantttaaaaatatntattttaangaaaanaaantnttattgattntntagaaaaaccattttaccaactnaaaaggannacnaatttctanntttgnaaaaaaancttntttataagtcccangtttnttttgcctgnggttcctttnctccggntcaaaaattggaaagtccccancttgnttaaaaaaagttnaaatagnttgggnncccngnggtnggnttttnctgccaggggnctcctnccatgttttctttccttaanttntnttgcncccccaaaaaattcnaantttttgtcttgtttcttnngggggctttgttnttncttnntgnnngnnttnttccnangnnccngaatngtttttgataaatttggnttnttncnnnntnnnanccncnntnnaaaaaangtttttnttatanccnaanccatgttttnanntcctnttaaaggntgtccngngccccnttnannggnttggaggaaccnnntntccnnngtgaattcacanattttntttntnnnaagatntanttgnnntattnntacctcttttttttcttcnnnccctnnaaaannntngttntttaagttttttatnacaattnnnntnnttatntn

SEQ ID NO: 45 - DNA, 1197 bp, Homo Sapiens
  misc_feature (482)..(482): n is a, c, g, or t
  misc_feature (491)..(491): n is a, c, g, or t
  misc_feature (494)..(494): n is a, c, g, or t
  misc_feature (502)..(505): n is a, c, g, or t
  misc_feature (507)..(507): n is a, c, g, or t
  misc_feature (509)..(509): n is a, c, g, or t
  misc_feature (512)..(514): n is a, c, g, or t
  misc_feature (516)..(517): n is a, c, g, or t
  misc_feature (519)..(519): n is a, c, g, or t
  misc_feature (521)..(521): n is a, c, g, or t
  misc_feature (526)..(526): n is a, c, g, or t
  misc_feature (528)..(528): n is a, c, g, or t
  misc_feature (533)..(535): n is a, c, g, or t
  misc_feature (543)..(543): n is a, c, g, or t
  misc_feature (547)..(547): n is a, c, g, or t
  misc_feature (551)..(551): n is a, c, g, or t
  misc_feature (562)..(562): n is a, c, g, or t
  misc_feature (567)..(567): n is a, c, g, or t
  misc_feature (569)..(570): n is a, c, g, or t
  misc_feature (572)..(572): n is a, c, g, or t
  misc_feature (586)..(589): n is a, c, g, or t
  misc_feature (591)..(591): n is a, c, g, or t
  misc_feature (593)..(594): n is a, c, g, or t
  misc_feature (599)..(599): n is a, c, g, or t
  misc_feature (603)..(603): n is a, c, g, or t
  misc_feature (613)..(613): n is a, c, g, or t
  misc_feature (617)..(617): n is a, c, g, or t
  misc_feature (624)..(624): n is a, c, g, or t
  misc_feature (628)..(628): n is a, c, g, or t
  misc_feature (634)..(634): n is a, c, g, or t
  misc_feature (637)..(637): n is a, c, g, or t
  misc_feature (640)..(640): n is a, c, g, or t
  misc_feature (646)..(646): n is a, c, g, or t
  misc_feature (650)..(650): n is a, c, g, or t
  misc_feature (655)..(655): n is a, c, g, or t
  misc_feature (657)..(657): n is a, c, g, or t
  misc_feature (659)..(659): n is a, c, g, or t
  misc_feature (663)..(663): n is a, c, g, or t
  misc_feature (665)..(666): n is a, c, g, or t
  misc_feature (678)..(678): n is a, c, g, or t
  misc_feature (682)..(682): n is a, c, g, or t
  misc_feature (685)..(685): n is a, c, g, or t
  misc_feature (695)..(695): n is a, c, g, or t
  misc_feature (698)..(699): n is a, c, g, or t
  misc_feature (709)..(709): n is a, c, g, or t
  misc_feature (714)..(719): n is a, c, g, or t
  misc_feature (728)..(728): n is a, c, g, or t
  misc_feature (733)..(733): n is a, c, g, or t
  misc_feature (735)..(735): n is a, c, g, or t
  misc_feature (738)..(738): n is a, c, g, or t
  misc_feature (743)..(749): n is a, c, g, or t
  misc_feature (751)..(751): n is a, c, g, or t
  misc_feature (753)..(753): n is a, c, g, or t
  misc_feature (755)..(757): n is a, c, g, or t
  misc_feature (760)..(760): n is a, c, g, or t
  misc_feature (763)..(763): n is a, c, g, or t
  misc_feature (765)..(765): n is a, c, g, or t
  misc_feature (780)..(782): n is a, c, g, or t
  misc_feature (785)..(785): n is a, c, g, or t
  misc_feature (787)..(788): n is a, c, g, or t
  misc_feature (792)..(793): n is a, c, g, or t
  misc_feature (796)..(796): n is a, c, g, or t
  misc_feature (801)..(801): n is a, c, g, or t
  misc_feature (805)..(805): n is a, c, g, or t
  misc_feature (809)..(810): n is a, c, g, or t
  misc_feature (819)..(821): n is a, c, g, or t
  misc_feature (826)..(827): n is a, c, g, or t
  misc_feature (836)..(837): n is a, c, g, or t
  misc_feature (843)..(844): n is a, c, g, or t
  misc_feature (847)..(847): n is a, c, g, or t
  misc_feature (861)..(863): n is a, c, g, or t
  misc_feature (869)..(873): n is a, c, g, or t
  misc_feature (879)..(879): n is a, c, g, or t
  misc_feature (889)..(889): n is a, c, g, or t
  misc_feature (893)..(895): n is a, c, g, or t
  misc_feature (905)..(912): n is a, c, g, or t
  misc_feature (914)..(918): n is a, c, g, or t
  misc_feature (921)..(922): n is a, c, g, or t
  misc_feature (926)..(926): n is a, c, g, or t
  misc_feature (932)..(932): n is a, c, g, or t
  misc_feature (947)..(947): n is a, c, g, or t
  misc_feature (959)..(960): n is a, c, g, or t
  misc_feature (962)..(962): n is a, c, g, or t
  misc_feature (983)..(988): n is a, c, g, or t
  misc_feature (991)..(991): n is a, c, g, or t
  misc_feature (993)..(993): n is a, c, g, or t
  misc_feature (1003)..(1003): n is a, c, g, or t
  misc_feature (1005)..(1006): n is a, c, g, or t
  misc_feature (1011)..(1011): n is a, c, g, or t
  misc_feature (1016)..(1017): n is a, c, g, or t
  misc_feature (1021)..(1022): n is a, c, g, or t
  misc_feature (1027)..(1027): n is a, c, g, or t
  misc_feature (1031)..(1031): n is a, c, g, or t
  misc_feature (1036)..(1036): n is a, c, g, or t
  misc_feature (1039)..(1039): n is a, c, g, or t
  misc_feature (1041)..(1041): n is a, c, g, or t
  misc_feature (1046)..(1047): n is a, c, g, or t
  misc_feature (1055)..(1056): n is a, c, g, or t
  misc_feature (1058)..(1058): n is a, c, g, or t
  misc_feature (1060)..(1061): n is a, c, g, or t
  misc_feature (1069)..(1069): n is a, c, g, or t
  misc_feature (1071)..(1076): n is a, c, g, or t
  misc_feature (1078)..(1078): n is a, c, g, or t
  misc_feature (1084)..(1084): n is a, c, g, or t
  misc_feature (1087)..(1087): n is a, c, g, or t
  misc_feature (1090)..(1090): n is a, c, g, or t
  misc_feature (1096)..(1096): n is a, c, g, or t
  misc_feature (1098)..(1099): n is a, c, g, or t
  misc_feature (1117)..(1118): n is a, c, g, or t
  misc_feature (1122)..(1124): n is a, c, g, or t
  misc_feature (1129)..(1129): n is a, c, g, or t
  misc_feature (1134)..(1134): n is a, c, g, or t
  misc_feature (1151)..(1151): n is a, c, g, or t
  misc_feature (1153)..(1153): n is a, c, g, or t
  misc_feature (1156)..(1157): n is a, c, g, or t
  misc_feature (1161)..(1161): n is a, c, g, or t
  misc_feature (1167)..(1169): n is a, c, g, or t
  misc_feature (1173)..(1173): n is a, c, g, or t
  misc_feature (1178)..(1178): n is a, c, g, or t
  misc_feature (1184)..(1184): n is a, c, g, or t
  misc_feature (1190)..(1190): n is a, c, g, or t
  misc_feature (1192)..(1192): n is a, c, g, or t
  misc_feature (1197)..(1197): n is a, c, g, or t
tagagaaattactatgagaggatcgcatcaccatcaccatcacggatcctatttaggtgacactatagaatcgtcgacccacgcgtccgaccgcggggaggctcacctcgagctgaacgccttccgcaggaagcatgattgtgccctggtcatctcgggagacttcctggaggtttgcctcaagtactatgagtacgagttcatggagctggcctgccagtgcccggccgtagtctgctgccgatgtgcccccacccagaaggcccagatcgtgcgcctgcttcaggagcgcacgggcaagctcacctgtgcactcagtaaaacgcagtgattcaaaaaaaaaaaaaaaaaaaaaaaaaaaaaaaaaaaaaaaaaaaaaaaaaaaaaaaaaaaaaaaaaaaaaaaaaaaaaaaaaaaaaaaaaaaaaaaaaaaaaaaaaaaaaaaaaaaaaaaaaaaaaaaaaaaaaaaaaaaagggggggnccccccccnaangggggccnnnntnanttnnntnncngnacttngnccccnnnttaaaaancccnaaanggcccccaaanccccntnngntttttttaaaaacnnnngntnnccccngggntttttttttngggnaaaaccnaacntttttnggnaantttttngggntttangnantttntnngggaaaaaaaancccnggnaaaacccccnttnnaaattccccnggggnnnnnnaaaaaaaanttttngnggnttttnnnnnnntntncnnnggnccntnaaaccaaccctttcnnnggnannttcnnccnttttnaaancccnnaaaaaaatnnnccccnntttttttcnngctttnnttntttttttgcccccnnnaaaaannnnncccccnaatttttttngggnnnaaaaaaaaannnnnnnntnnnnntanntggnaaaaantttcccccttttttncccccttttttnnanaaaaaaaaaaaaatttttttnnnnnnttngnaaaaaaaaancnnaaaantttcnngggnnttttnaaanaattnttncnaaaanngggggggnntntnngaaaaaancnnnnnntnttttcnccnaanggtttntnnaaaaattttttttttttnncccnnnccccnggggnatttccccctttttttntnaanngggnccaaannnaaanttttncccccntttttncnggggn

SEQ ID NO: 46 - DNA, 973 bp, Homo Sapiens
ttaactatgagaggtcgcatcaccatcaccatcacggatcctatttaggtgacactatagaatcgtcgacccacgcgtccgcgggagcggagagcggaccccagagagccctgagcagccccaccgccgccgccggcctagttaccatcacaccccgggaggagccgcagctgccgcagccggccccagtcaccatcaccgcaaccatgagcagcgaggccgagacccagcagccgcccgccgccccccccgccgcccccgccctcagcgccgccgacaccaagcccggcactacgggcagcggcgcagggagcggtggcccgggcggcctcacatcggcggcgcctgccggcggggacaagaaggtcatcgcaacgaaggttttgggaacagtaaaatggttcaatgtaaggaacggatatggtttcatcaacaggaatgacaccaaggaagatgtatttgtacaccagactgccataaagaagaataaccccaggaagtaccttcgcagtgtaggagatggagagactgtggagtttgatgttgttgaaggagaaaagggtgcggaggcagcaaatgttacaggtcctggtggtgttccagttcaaggcagtaaatatgcagcagaccgtaaccattatagacgctatccacgtcgtaggggtcctccacgcaattaccagcaaaattaccacagtattccaaccctcctgtgcagggagaagtgatggagggtgctgacaaccagggtgcaggagaacaaggtagaccagtgaggcagaatatgtatcggggatatagaccacgattccgcaggggccctcctcgccaaagacagcctagagaggacggcaatgaagaagataaagaaaatcaaggagatgagacccaaggtcagcagccacctcaacgtcggtaccgccgcaacttcaattaccgacgcagacgcccagaaaaccctaaaccacaagat

SEQ ID NO: 47 - DNA, 1428 bp, Homo Sapiens
  misc_feature (442)..(442): n is a, c, g, or t
  misc_feature (637)..(637): n is a, c, g, or t
  misc_feature (643)..(643): n is a, c, g, or t
  misc_feature (712)..(712): n is a, c, g, or t
  misc_feature (717)..(717): n is a, c, g, or t
  misc_feature (818)..(818): n is a, c, g, or t
  misc_feature (825)..(826): n is a, c, g, or t
  misc_feature (833)..(833): n is a, c, g, or t
  misc_feature (840)..(840): n is a, c, g, or t
  misc_feature (842)..(842): n is a, c, g, or t
  misc_feature (854)..(854): n is a, c, g, or t
  misc_feature (888)..(888): n is a, c, g, or t
  misc_feature (897)..(897): n is a, c, g, or t
  misc_feature (901)..(901): n is a, c, g, or t
  misc_feature (909)..(909): n is a, c, g, or t
  misc_feature (912)..(912): n is a, c, g, or t
  misc_feature (928)..(929): n is a, c, g, or t
  misc_feature (950)..(950): n is a, c, g, or t
  misc_feature (957)..(957): n is a, c, g, or t
  misc_feature (968)..(968): n is a, c, g, or t
  misc_feature (970)..(970): n is a, c, g, or t
  misc_feature (973)..(973): n is a, c, g, or t
  misc_feature (975)..(975): n is a, c, g, or t
  misc_feature (977)..(979): n is a, c, g, or t
  misc_feature (984)..(984): n is a, c, g, or t
  misc_feature (986)..(987): n is a, c, g, or t
  misc_feature (998)..(998): n is a, c, g, or t
  misc_feature (1004)..(1004): n is a, c, g, or t
  misc_feature (1009)..(1009): n is a, c, g, or t
  misc_feature (1014)..(1014): n is a, c, g, or t
  misc_feature (1020)..(1020): n is a, c, g, or t
  misc_feature (1031)..(1031): n is a, c, g, or t
  misc_feature (1035)..(1035): n is a, c, g, or t
  misc_feature (1045)..(1045): n is a, c, g, or t
  misc_feature (1048)..(1048): n is a, c, g, or t
  misc_feature (1050)..(1050): n is a, c, g, or t
  misc_feature (1074)..(1074): n is a, c, g, or t
  misc_feature (1080)..(1082): n is a, c, g, or t
  misc_feature (1099)..(1099): n is a, c, g, or t
  misc_feature (1105)..(1105): n is a, c, g, or t
  misc_feature (1107)..(1107): n is a, c, g, or t
  misc_feature (1109)..(1109): n is a, c, g, or t
  misc_feature (1116)..(1117): n is a, c, g, or t
  misc_feature (1120)..(1121): n is a, c, g, or t
  misc_feature (1123)..(1123): n is a, c, g, or t
  misc_feature (1126)..(1129): n is a, c, g, or t
  misc_feature (1143)..(1144): n is a, c, g, or t
  misc_feature (1148)..(1148): n is a, c, g, or t
  misc_feature (1150)..(1150): n is a, c, g, or t
  misc_feature (1157)..(1157): n is a, c, g, or t
  misc_feature (1164)..(1164): n is a, c, g, or t
  misc_feature (1166)..(1166): n is a, c, g, or t
  misc_feature (1169)..(1169): n is a, c, g, or t
  misc_feature (1173)..(1173): n is a, c, g, or t
  misc_feature (1183)..(1184): n is a, c, g, or t
  misc_feature (1187)..(1187): n is a, c, g, or t
  misc_feature (1194)..(1194): n is a, c, g, or t
  misc_feature (1196)..(1196): n is a, c, g, or t
  misc_feature (1202)..(1202): n is a, c, g, or t
  misc_feature (1217)..(1219): n is a, c, g, or t
  misc_feature (1222)..(1223): n is a, c, g, or t
  misc_feature (1235)..(1235): n is a, c, g, or t
  misc_feature (1242)..(1243): n is a, c, g, or t
  misc_feature (1245)..(1246): n is a, c, g, or t
  misc_feature (1250)..(1250): n is a, c, g, or t
  misc_feature (1253)..(1253): n is a, c, g, or t
  misc_feature (1255)..(1256): n is a, c, g, or t
  misc_feature (1258)..(1259): n is a, c, g, or t
  misc_feature (1261)..(1261): n is a, c, g, or t
  misc_feature (1263)..(1263): n is a, c, g, or t
  misc_feature (1266)..(1266): n is a, c, g, or t
  misc_feature (1276)..(1276): n is a, c, g, or t
  misc_feature (1289)..(1290): n is a, c, g, or t
  misc_feature (1292)..(1292): n is a, c, g, or t
  misc_feature (1297)..(1299): n is a, c, g, or t
  misc_feature (1304)..(1305): n is a, c, g, or t
  misc_feature (1313)..(1313): n is a, c, g, or t
  misc_feature (1316)..(1317): n is a, c, g, or t
  misc_feature (1322)..(1322): n is a, c, g, or t
  misc_feature (1325)..(1325): n is a, c, g, or t
  misc_feature (1327)..(1327): n is a, c, g, or t
  misc_feature (1334)..(1334): n is a, c, g, or t
  misc_feature (1336)..(1336): n is a, c, g, or t
  misc_feature (1340)..(1340): n is a, c, g, or t
  misc_feature (1345)..(1345): n is a, c, g, or t
  misc_feature (1348)..(1348): n is a, c, g, or t
  misc_feature (1353)..(1353): n is a, c, g, or t
  misc_feature (1357)..(1357): n is a, c, g, or t
  misc_feature (1361)..(1361): n is a, c, g, or t
  misc_feature (1370)..(1370): n is a, c, g, or t
  misc_feature (1372)..(1372): n is a, c, g, or t
  misc_feature (1381)..(1381): n is a, c, g, or t
  misc_feature (1383)..(1383): n is a, c, g, or t
  misc_feature (1392)..(1392): n is a, c, g, or t
  misc_feature (1398)..(1398): n is a, c, g, or t
  misc_feature (1400)..(1400): n is a, c, g, or t
  misc_feature (1402)..(1402): n is a, c, g, or t
  misc_feature (1405)..(1406): n is a, c, g, or t
  misc_feature (1418)..(1418): n is a, c, g, or t
  misc_feature (1423)..(1423): n is a, c, g, or t
  misc_feature (1426)..(1426): n is a, c, g, or t
gattgagaaattactatgagaggatcgcatcaccatcaccatcacggatcctatttaggtgacactatagaatcgtcgacccacgcgtccgcccacgcgtccgcggacctactgggctccatcctgagctccatggagaagccacccagcctcggtgaccaggagactcggcgcaaggcccgagaacaggccgcccgcctgaagaaactacaagagcaagagaaacaacagaaagtggagtttcgtaaaaggatggagaaggaggtgtcagatttcattcaagacagtgggcagatcaagaaaaagtttcagccaatgaacaagatcgagaggagcatactacatgatgtggtggaagtggctggcctgacatccttctcctttggggaagatgatgactgtcgctatgtcatgatcttcaaaaaggagtttgcaccctcanatgaagagctagactcttaccgtcgtggagaggaatgggacccccagaaggctgaggagaagcggaagctgaaggagctggcccagaggcaagaggaggaggcagcccagcaggggcctgtggtggtgagccctgccagcgactacaaggacaagtacagccacctcatcggcaagggagcagccaaagacgcancccacntgctacaggccaataagacctacggctgtggtgaggccacagtgcggctgggggtggctgggagaggancatangatgcggcaggagggcagtggaggctgaagtacggatttctaggccccgccctaccctcctctctgcccctagtgcccgtggccaataaaaagggacaccngcctccnnttgaaanagggctntngaatgaaattcnaagcccaataaacgtctggcggcaaaattggggnaaaaaattncccnccaacctnctnagcggccccgcccagnnttccttttgaacccctggggncagggcnaggggctaggnanaananannntttgntnnctttttaaaancccctnctggnaaccncccccnctgaaaccccntccnaccaactttnccncnagttggggataaaacaggggtttnaatttnnncccccttggaacttgantttttncntngccttgnnttnntnttnnnncaaaatttaatatnncacngngggaaanttaaccngnatntatnccccttctgnnaanttttctncncccggnggggggggtattttnnnttnnaaaatttgtttnccccctnnannaaanatnanntnnananatntgtggcgcgncccctctttaggnncngatannnaattnncaattttntcnnttganaananaaagctncnaacnccttnttnttatnaaanctcntttcccgcntntttttttananctacctttnttcttntntnccnnatgtattaaaanctttnttntc

SEQ ID NO: 48 - DNA, 862 bp, Homo Sapiens
  misc_feature (3)..(3): n is a, c, g, or t
  misc_feature (582)..(582): n is a, c, g, or t
  misc_feature (670)..(670): n is a, c, g, or t
  misc_feature (703)..(703): n is a, c, g, or t
  misc_feature (721)..(721): n is a, c, g, or t
  misc_feature (739)..(739): n is a, c, g, or t
  misc_feature (749)..(750): n is a, c, g, or t
  misc_feature (779)..(779): n is a, c, g, or t
  misc_feature (783)..(783): n is a, c, g, or t
  misc_feature (794)..(794): n is a, c, g, or t
  misc_feature (813)..(813): n is a, c, g, or t
  misc_feature (817)..(817): n is a, c, g, or t
  misc_feature (824)..(824): n is a, c, g, or t
  misc_feature (829)..(829): n is a, c, g, or t
  misc_feature (832)..(832): n is a, c, g, or t
  misc_feature (834)..(834): n is a, c, g, or t
  misc_feature (840)..(840): n is a, c, g, or t
  misc_feature (842)..(842): n is a, c, g, or t
  misc_feature (847)..(847): n is a, c, g, or t
  misc_feature (856)..(857): n is a, c, g, or t
atntagagaaattactatgagaggatcgcatcaccatcaccatcacggatcctatttaggtgacactatagaatcgtcgacccacgcgtccggcgcggcggctgctggagccgggggcggcggagccagccgagcgcggcgcggagccggaggcgggcgcggagccggcgggggccgaggtggctgggcccggggccgcagcggcgggggcagtcggggctccggtgcccgtggattgctcggacgaggcgggcaacaccgcactgcagttcgccgcggccgggggccacgaaccgctggtgcgcttcctgctgcgccgcggtgcctcggtcaacagccgcaaccactacggctggagcgcgctcatgcaggcggccagatgaggagaaaaggcgacctgatattttccatgcattgaaaatgggaaacttccagctggtcaaagagattgccgatgaagaccccagccacgtgaacttggtcaatggggacggggcgacgccactgatgctagcagctgttacggggcagctggctctggtgcagctgctggtggagaggcacgcggatgttgacaagcangacagcgtgcatggctggacggccctcatgcaggcaacctaccatggacacggaacttgttcgactgctggcatctgtctgcatgcangtgaataaagacaaaggccggccgagccaccancctcccctgccccactcnaaggtccgacagccctgnagcatcccanntgctgcccgatgacaagggtggaatgaanttcntggtggaaccnaatgtccaaatcggttccnaaanctcaaantgatncananctgccncntgggnttgtccaannaacca

SEQ ID NO: 49 - DNA, 4240 bp, Homo Sapiens
  misc_feature (748)..(748): n is a, c, g, or t
  misc_feature (807)..(807): n is a, c, g, or t
  misc_feature (840)..(840): n is a, c, g, or t
  misc_feature (843)..(843): n is a, c, g, or t
  misc_feature (910)..(910): n is a, c, g, or t
  misc_feature (920)..(920): n is a, c, g, or t
  misc_feature (928)..(928): n is a, c, g, or t
  misc_feature (958)..(958): n is a, c, g, or t
  misc_feature (1001)..(1001): n is a, c, g, or t
  misc_feature (1013)..(1014): n is a, c, g, or t
  misc_feature (1020)..(1020): n is a, c, g, or t
  misc_feature (1046)..(1046): n is a, c, g, or t
  misc_feature (1054)..(1054): n is a, c, g, or t
  misc_feature (1057)..(1057): n is a, c, g, or t
  misc_feature (1060)..(1060): n is a, c, g, or t
  misc_feature (1065)..(1065): n is a, c, g, or t
  misc_feature (1072)..(1072): n is a, c, g, or t
  misc_feature (1075)..(1075): n is a, c, g, or t
  misc_feature (1086)..(1086): n is a, c, g, or t
  misc_feature (1089)..(1089): n is a, c, g, or t
  misc_feature (1096)..(1097): n is a, c, g, or t
  misc_feature (1100)..(1101): n is a, c, g, or t
  misc_feature (1103)..(1103): n is a, c, g, or t
  misc_feature (1113)..(1113): n is a, c, g, or t
  misc_feature (1118)..(1119): n is a, c, g, or t
  misc_feature (1121)..(1121): n is a, c, g, or t
  misc_feature (1131)..(1131): n is a, c, g, or t
  misc_feature (1134)..(1134): n is a, c, g, or t
  misc_feature (1136)..(1136): n is a, c, g, or t
  misc_feature (1142)..(1142): n is a, c, g, or t
  misc_feature (1145)..(1145): n is a, c, g, or t
  misc_feature (1150)..(1151): n is a, c, g, or t
  misc_feature (1157)..(1157): n is a, c, g, or t
  misc_feature (1159)..(1159): n is a, c, g, or t
  misc_feature (1163)..(1165): n is a, c, g, or t
  misc_feature (1168)..(1168): n is a, c, g, or t
  misc_feature (1170)..(1171): n is a, c, g, or t
  misc_feature (1173)..(1173): n is a, c, g, or t
  misc_feature (1181)..(1181): n is a, c, g, or t
  misc_feature (1185)..(1185): n is a, c, g, or t
  misc_feature (1191)..(1191): n is a, c, g, or t
  misc_feature (1196)..(1196): n is a, c, g, or t
  misc_feature (1207)..(1207): n is a, c, g, or t
  misc_feature (1210)..(1210): n is a, c, g, or t
  misc_feature (1216)..(1216): n is a, c, g, or t
  misc_feature (1223)..(1223): n is a, c, g, or t
  misc_feature (1225)..(1225): n is a, c, g, or t
  misc_feature (1228)..(1230): n is a, c, g, or t
  misc_feature (1237)..(1237): n is a, c, g, or t
  misc_feature (1245)..(1245): n is a, c, g, or t
  misc_feature (1254)..(1254): n is a, c, g, or t
  misc_feature (1256)..(1257): n is a, c, g, or t
  misc_feature (1260)..(1260): n is a, c, g, or t
  misc_feature (1263)..(1265): n is a, c, g, or t
  misc_feature (1269)..(1270): n is a, c, g, or t
  misc_feature (1277)..(1277): n is a, c, g, or t
  misc_feature (1279)..(1281): n is a, c, g, or t
  misc_feature (1289)..(1290): n is a, c, g, or t
  misc_feature (1294)..(1296): n is a, c, g, or t
  misc_feature (1301)..(1303): n is a, c, g, or t
  misc_feature (1305)..(1307): n is a, c, g, or t
  misc_feature (1309)..(1309): n is a, c, g, or t
  misc_feature (1313)..(1314): n is a, c, g, or t
  misc_feature (1317)..(1318): n is a, c, g, or t
  misc_feature (1321)..(1321): n is a, c, g, or t
  misc_feature (1323)..(1325): n is a, c, g, or t
  misc_feature (1330)..(1331): n is a, c, g, or t
  misc_feature (1336)..(1338): n is a, c, g, or t
  misc_feature (1342)..(1347): n is a, c, g, or t
  misc_feature (1350)..(1353): n is a, c, g, or t
  misc_feature (1357)..(1357): n is a, c, g, or t
  misc_feature (1359)..(1359): n is a, c, g, or t
  misc_feature (1363)..(1363): n is a, c, g, or t
  misc_feature (1375)..(1379): n is a, c, g, or t
  misc_feature (1387)..(1388): n is a, c, g, or t
  misc_feature (1392)..(1394): n is a, c, g, or t
  misc_feature (1399)..(1402): n is a, c, g, or t
  misc_feature (1405)..(1406): n is a, c, g, or t
  misc_feature (1408)..(1408): n is a, c, g, or t
  misc_feature (1412)..(1412): n is a, c, g, or t
  misc_feature (1414)..(1416): n is a, c, g, or t
  misc_feature (1420)..(1420): n is a, c, g, or t
  misc_feature (2168)..(2168): n is a, c, g, or t
  misc_feature (2227)..(2227): n is a, c, g, or t
  misc_feature (2260)..(2260): n is a, c, g, or t
  misc_feature (2263)..(2263): n is a, c, g, or t
  misc_feature (2330)..(2330): n is a, c, g, or t
  misc_feature (2340)..(2340): n is a, c, g, or t
  misc_feature (2348)..(2348): n is a, c, g, or t
  misc_feature (2378)..(2378): n is a, c, g, or t
  misc_feature (2421)..(2421): n is a, c, g, or t
  misc_feature (2433)..(2434): n is a, c, g, or t
  misc_feature (2440)..(2440): n is a, c, g, or t
  misc_feature (2466)..(2466): n is a, c, g, or t
  misc_feature (2474)..(2474): n is a, c, g, or t
  misc_feature (2477)..(2477): n is a, c, g, or t
  misc_feature (2480)..(2480): n is a, c, g, or t
  misc_feature (2485)..(2485): n is a, c, g, or t
  misc_feature (2492)..(2492): n is a, c, g, or t
  misc_feature (2495)..(2495): n is a, c, g, or t
  misc_feature (2506)..(2506): n is a, c, g, or t
  misc_feature (2509)..(2509): n is a, c, g, or t
  misc_feature (2516)..(2517): n is a, c, g, or t
  misc_feature (2520)..(2521): n is a, c, g, or t
  misc_feature (2523)..(2523): n is a, c, g, or t
  misc_feature (2533)..(2533): n is a, c, g, or t
  misc_feature (2538)..(2539): n is a, c, g, or t
  misc_feature (2541)..(2541): n is a, c, g, or t
  misc_feature (2551)..(2551): n is a, c, g, or t
  misc_feature (2554)..(2554): n is a, c, g, or t
  misc_feature (2556)..(2556): n is a, c, g, or t
  misc_feature (2562)..(2562): n is a, c, g, or t
  misc_feature (2565)..(2565): n is a, c, g, or t
  misc_feature (2570)..(2571): n is a, c, g, or t
  misc_feature (2576)..(2576): n is a, c, g, or t
  misc_feature (2578)..(2578): n is a, c, g, or t
  misc_feature (3324)..(3324): n is a, c, g, or t
  misc_feature (3419)..(3419): n is a, c, g, or t
  misc_feature (3446)..(3446): n is a, c, g, or t
  misc_feature (3474)..(3474): n is a, c, g, or t
  misc_feature (3531)..(3531): n is a, c, g, or t
  misc_feature (3554)..(3554): n is a, c, g, or t
  misc_feature (3573)..(3573): n is a, c, g, or t
  misc_feature (3586)..(3586): n is a, c, g, or t
  misc_feature (3592)..(3592): n is a, c, g, or t
  misc_feature (3596)..(3596): n is a, c, g, or t
  misc_feature (3599)..(3599): n is a, c, g, or t
  misc_feature (3601)..(3601): n is a, c, g, or t
  misc_feature (3614)..(3614): n is a, c, g, or t
  misc_feature (3621)..(3621): n is a, c, g, or t
  misc_feature (3625)..(3625): n is a, c, g, or t
  misc_feature (3656)..(3656): n is a, c, g, or t
  misc_feature (3658)..(3658): n is a, c, g, or t
  misc_feature (3667)..(3667): n is a, c, g, or t
  misc_feature (3669)..(3669): n is a, c, g, or t
  misc_feature (3676)..(3676): n is a, c, g, or t
  misc_feature (3693)..(3693): n is a, c, g, or t
  misc_feature (3697)..(3697): n is a, c, g, or t
  misc_feature (3704)..(3704): n is a, c, g, or t
  misc_feature (3714)..(3714): n is a, c, g, or t
  misc_feature (3728)..(3728): n is a, c, g, or t
  misc_feature (3730)..(3730): n is a, c, g, or t
  misc_feature (3741)..(3742): n is a, c, g, or t
  misc_feature (3747)..(3747): n is a, c, g, or t
  misc_feature (3755)..(3755): n is a, c, g, or t
  misc_feature (3760)..(3760): n is a, c, g, or t
  misc_feature (3762)..(3762): n is a, c, g, or t
  misc_feature (3774)..(3774): n is a, c, g, or t
  misc_feature (3780)..(3780): n is a, c, g, or t
  misc_feature (3783)..(3783): n is a, c, g, or t
  misc_feature (3786)..(3786): n is a, c, g, or t
  misc_feature (3788)..(3788): n is a, c, g, or t
  misc_feature (3796)..(3796): n is a, c, g, or t
  misc_feature (3798)..(3798): n is a, c, g, or t
  misc_feature (3802)..(3802): n is a, c, g, or t
  misc_feature (3806)..(3806): n is a, c, g, or t
  misc_feature (3810)..(3811): n is a, c, g, or t
  misc_feature (3819)..(3819): n is a, c, g, or t
  misc_feature (3821)..(3822): n is a, c, g, or t
  misc_feature (3833)..(3833): n is a, c, g, or t
  misc_feature (3846)..(3846): n is a, c, g, or t
  misc_feature (3849)..(3849): n is a, c, g, or t
  misc_feature (3852)..(3852): n is a, c, g, or t
  misc_feature (3867)..(3867): n is a, c, g, or t
  misc_feature (3872)..(3872): n is a, c, g, or t
  misc_feature (3880)..(3881): n is a, c, g, or t
  misc_feature (3884)..(3885): n is a, c, g, or t
  misc_feature (3889)..(3889): n is a, c, g, or t
  misc_feature (3893)..(3894): n is a, c, g, or t
  misc_feature (3899)..(3899): n is a, c, g, or t
  misc_feature (3906)..(3907): n is a, c, g, or t
  misc_feature (3914)..(3914): n is a, c, g, or t
  misc_feature (3918)..(3918): n is a, c, g, or t
  misc_feature (3931)..(3931): n is a, c, g, or t
  misc_feature (3937)..(3937): n is a, c, g, or t
  misc_feature (3942)..(3942): n is a, c, g, or t
  misc_feature (3965)..(3965): n is a, c, g, or t
  misc_feature (3967)..(3967): n is a, c, g, or t
  misc_feature (3971)..(3971): n is a, c, g, or t
  misc_feature (3977)..(3977): n is a, c, g, or t
  misc_feature (3979)..(3979): n is a, c, g, or t
  misc_feature (3983)..(3985): n is a, c, g, or t
  misc_feature (3988)..(3988): n is a, c, g, or t
  misc_feature (3990)..(3991): n is a, c, g, or t
  misc_feature (3993)..(3993): n is a, c, g, or t
  misc_feature (4001)..(4001): n is a, c, g, or t
  misc_feature (4005)..(4005): n is a, c, g, or t
  misc_feature (4011)..(4011): n is a, c, g, or t
  misc_feature (4016)..(4016): n is a, c, g, or t
  misc_feature (4027)..(4027): n is a, c, g, or t
  misc_feature (4030)..(4030): n is a, c, g, or t
  misc_feature (4036)..(4036): n is a, c, g, or t
  misc_feature (4043)..(4043): n is a, c, g, or t
  misc_feature (4045)..(4045): n is a, c, g, or t
  misc_feature (4048)..(4050): n is a, c, g, or t
  misc_feature (4057)..(4057): n is a, c, g, or t
  misc_feature (4065)..(4065): n is a, c, g, or t
  misc_feature (4074)..(4074): n is a, c, g, or t
  misc_feature (4076)..(4077): n is a, c, g, or t
  misc_feature (4080)..(4080): n is a, c, g, or t
  misc_feature (4083)..(4085): n is a, c, g, or t
  misc_feature (4089)..(4090): n is a, c, g, or t
  misc_feature (4097)..(4097): n is a, c, g, or t
  misc_feature (4099)..(4101): n is a, c, g, or t
  misc_feature (4109)..(4110): n is a, c, g, or t
  misc_feature (4114)..(4116): n is a, c, g, or t
  misc_feature (4121)..(4123): n is a, c, g, or t
  misc_feature (4125)..(4127): n is a, c, g, or t
  misc_feature (4129)..(4129): n is a, c, g, or t
  misc_feature (4133)..(4134): n is a, c, g, or t
  misc_feature (4137)..(4138): n is a, c, g, or t
  misc_feature (4141)..(4141): n is a, c, g, or t
  misc_feature (4143)..(4145): n is a, c, g, or t
  misc_feature (4150)..(4151): n is a, c, g, or t
  misc_feature (4156)..(4158): n is a, c, g, or t
  misc_feature (4162)..(4167): n is a, c, g, or t
  misc_feature (4170)..(4173): n is a, c, g, or t
  misc_feature (4177)..(4177): n is a, c, g, or t
  misc_feature (4179)..(4179): n is a, c, g, or t
  misc_feature (4183)..(4183): n is a, c, g, or t
  misc_feature (4195)..(4199): n is a, c, g, or t
  misc_feature (4207)..(4208): n is a, c, g, or t
  misc_feature (4212)..(4214): n is a, c, g, or t
  misc_feature (4219)..(4222): n is a, c, g, or t
  misc_feature (4225)..(4226): n is a, c, g, or t
  misc_feature (4228)..(4228): n is a, c, g, or t
  misc_feature (4232)..(4232): n is a, c, g, or t
  misc_feature (4234)..(4236): n is a, c, g, or t
  misc_feature (4240)..(4240): n is a, c, g, or t
tagagaaattactatgagaggatcgcatcaccatcaccatcacggatcctatttaggtgacactatagaatcgtcgacccacgcgtccggccactgcacctccctgatggttgggctgatccggcagggctacgcctgcgaggtgtgttcctttgcttgccacgtgtcctgcaaagacggtgccccccaggtgtgcccaatacctcccgagcagtccaagaggcctctgggcgtggacgtgcagcgaggcatcggaacagcctacaaaggccatgtcaaggtcccaaagcccacgggggtgaagaagggatggcagcgcgcatatgcagtcgtctgtgactgcaagctcttcctgtatgatctgcctgaaggaaaatccacccagcctggtgtcattgcgagccaagtcttggatctcagagatgacgagttttccgtgagctcagtcctggcctcagatgtcattcatgctacacccgagatattccatgtatattcagggtgacggcctctctcttaggtgcaccttctaagaccagctcgctgctcattctgacagaaaatgagaatgaaaagaggaagtgggttgggattctagaaggactccagtccatccttcataaaaaccggctgaggaatcaggtcgtgcatgttcccttggaagcctacgacagctcgctgcctctcatcaaggccatcctgacagctgccatcgtggatgcagacaggattgcagtcggcctaaaanaagggctctatgtcatagaggtcacccgagatgtgatcgtccgtgccgctgactgtaanaaggtacaccagatcgagcttgctcccaggganaanatcgtaatcctcctctgtggccggaaccaccatgtgcacctctatccgtggtcgtcccttgatggancggaaagcancttttganatcaagcttccggaaaccaaaggctgccanctcatggccacggccacactcaaaagaactctgggcacctgcntgtttggggccnngaaaanggctgaatcctttgctatgaaatccnaaaaaacnaanccnttccnaaaaaanttnaatgaaatttnggnttcccgnnacnngnaatgcctggnggtgnntnaggaaaaggntcngngggggncanccttnngggttngnccgnnnaananncnaggggaangggnaccccnaaacngggaaaacccnaanaacccnccttggntnctnnnaaaaaanttttttangcccttttntnnggnaannnaaannaaaaaancnnntttttttnncccnnnggaannnannnancccnngcnngangnnnccccnnaaaannngggnnnnnnccnnnncccntntttncccccccccccnnnnnaaaaaaanngggnnnttttnnnnccnnangggnannncccntagagaaattactatgagaggatcgcatcaccatcaccatcacggatcctatttaggtgacactatagaatcgtcgacccacgcgtccggccactgcacctccctgatggttgggctgatccggcagggctacgcctgcgaggtgtgttcctttgcttgccacgtgtcctgcaaagacggtgccccccaggtgtgcccaatacctcccgagcagtccaagaggcctctgggcgtggacgtgcagcgaggcatcggaacagcctacaaaggccatgtcaaggtcccaaagcccacgggggtgaagaagggatggcagcgcgcatatgcagtcgtctgtgactgcaagctcttcctgtatgatctgcctgaaggaaaatccacccagcctggtgtcattgcgagccaagtcttggatctcagagatgacgagttttccgtgagctcagtcctggcctcagatgtcattcatgctacacccgagatattccatgtatattcagggtgacggcctctctcttaggtgcaccttctaagaccagctcgctgctcattctgacagaaaatgagaatgaaaagaggaagtgggttgggattctagaaggactccagtccatccttcataaaaaccggctgaggaatcaggtcgtgcatgttcccttggaagcctacgacagctcgctgcctctcatcaaggccatcctgacagctgccatcgtggatgcagacaggattgcagtcggcctaaaanaagggctctatgtcatagaggtcacccgagatgtgatcgtccgtgccgctgactgtaanaaggtacaccagatcgagcttgctcccaggganaanatcgtaatcctcctctgtggccggaaccaccatgtgcacctctatccgtggtcgtcccttgatggancggaaagcancttttganatcaagcttccggaaaccaaaggctgccanctcatggccacggccacactcaaaagaactctgggcacctgcntgtttggggccnngaaaanggctgaatcctttgctatgaaatccnaaaaaacnaanccnttccnaaaaaanttnaatgaaatttnggnttcccgnnacnngnaatgcctggnggtgnntnaggaaaaggntcngngggggncanccttnngggtnantagagaaattactatgagaggatcgcatcaccatcaccatcacggatcctatttaggtgacactatagaatcgtcgacccacgcgtccgaccgatctgggctggtcgcgacctacgctgatccaggagaaggccatcccactggccctagaagggaaggacctcctggctcgggcccgcacgggctccgggaagacggccgcttatgctattccgatgctgcagctgttgctccataggaaggcgacaggtccggtggtagaacaggcagtgagaggccttgttcttgttcctaccaaggagctggcacggcaagcacagtccatgattcagcagctggctacctactgtgctcgggatgtccgagtggccaatgtctcagctgctgaagactcagtctctcagagagctgtgctgatggagaagccagatgtggtagtagggaccccatctcgcatattaagccacttgcagcaagacagcctgaaacttcgtgactccctggagcttttggtggtggacgaagctgaccttcttttttcctttggctttgaagaagagctcaagagtctcctctgtcacttgccccggatttaccaggcttttctcatgtcagctacttttaacgaggacgtacaagcactcaaggagctgatattacataacccggttacccttaagttacaggagtcccagctgcctgggccagaccagttacagcagtttcaggtggtctgtgagactgangaagacaaattcctcctgctgtatgccctgctcaagctgtcattgattcggggcaagtctctgctctttgtcaacactctagaacggagttaccngctacgcctgttcttggaacagttcancatccccacctgtgtgctcaatggagancttccactgcgctccaggtgccccatcatctcacagttcaaccaaggcttctacgantgtgtcataaccacctgatgctnaaattcctggggggccccnagtcaaggggaanccgtcngggnccnanggcccaaaggggnaaaaggncctntgatccggaaaccaaggggtggcccgggggnanaaacttccncnatgggtntgctgggctcaactttnaatnttccccnaacccctgangcctaaatccatcnanggtgggagaannccccnccctaaancccangnataattttaacntttggnttnccngnaacaattncncttngganaatnnaaaacttntnntggaaaaaaangggcccctttgcnccncanattcgaaagaaaaanaaggntttccttnnctnngganacanncccanaaaaaanngcctttngganaaaaaaaaaaaanaaaatnctttnaaataaaaattttaaaccgggcncngggnggactngnccgnnnaananncnaggggaangggnaccccnaaacngggaaaacccnaanaacccnccttggntnctnnnaaaaaanttttttangcccttttntnnggnaannnaaannaaaaaancnnntttttttnncccnnnggaannnannnancccnngcnngangnnnccccnnaaaannngggnnnnnnccnnnncccntntttncccccccccccnnnnnaaaaaaanngggnnnttttnnnnccnnangggnannncccn

SEQ ID NO: 50 - DNA, 1400 bp, Homo Sapiens
  misc_feature (1)..(1): n is a, c, g, or t
  misc_feature (3)..(3): n is a, c, g, or t
  misc_feature (749)..(749): n is a, c, g, or t
  misc_feature (844)..(844): n is a, c, g, or t
  misc_feature (871)..(871): n is a, c, g, or t
  misc_feature (899)..(899): n is a, c, g, or t
  misc_feature (956)..(956): n is a, c, g, or t
  misc_feature (979)..(979): n is a, c, g, or t
  misc_feature (998)..(998): n is a, c, g, or t
  misc_feature (1011)..(1011): n is a, c, g, or t
  misc_feature (1017)..(1017): n is a, c, g, or t
  misc_feature (1021)..(1021): n is a, c, g, or t
  misc_feature (1024)..(1024): n is a, c, g, or t
  misc_feature (1026)..(1026): n is a, c, g, or t
  misc_feature (1039)..(1039): n is a, c, g, or t
  misc_feature (1046)..(1046): n is a, c, g, or t
  misc_feature (1050)..(1050): n is a, c, g, or t
  misc_feature (1081)..(1081): n is a, c, g, or t
  misc_feature (1083)..(1083): n is a, c, g, or t
  misc_feature (1092)..(1092): n is a, c, g, or t
  misc_feature (1094)..(1094): n is a, c, g, or t
  misc_feature (1101)..(1101): n is a, c, g, or t
  misc_feature (1118)..(1118): n is a, c, g, or t
  misc_feature (1122)..(1122): n is a, c, g, or t
  misc_feature (1129)..(1129): n is a, c, g, or t
  misc_feature (1139)..(1139): n is a, c, g, or t
  misc_feature (1153)..(1153): n is a, c, g, or t
  misc_feature (1155)..(1155): n is a, c, g, or t
  misc_feature (1166)..(1167): n is a, c, g, or t
  misc_feature (1172)..(1172): n is a, c, g, or t
  misc_feature (1180)..(1180): n is a, c, g, or t
  misc_feature (1185)..(1185): n is a, c, g, or t
  misc_feature (1187)..(1187): n is a, c, g, or t
  misc_feature (1199)..(1199): n is a, c, g, or t
  misc_feature (1205)..(1205): n is a, c, g, or t
  misc_feature (1208)..(1208): n is a, c, g, or t
  misc_feature (1211)..(1211): n is a, c, g, or t
  misc_feature (1213)..(1213): n is a, c, g, or t
  misc_feature (1221)..(1221): n is a, c, g, or t
  misc_feature (1223)..(1223): n is a, c, g, or t
  misc_feature (1227)..(1227): n is a, c, g, or t
  misc_feature (1231)..(1231): n is a, c, g, or t
  misc_feature (1235)..(1236): n is a, c, g, or t
  misc_feature (1244)..(1244): n is a, c, g, or t
  misc_feature (1246)..(1247): n is a, c, g, or t
  misc_feature (1258)..(1258): n is a, c, g, or t
  misc_feature (1271)..(1271): n is a, c, g, or t
  misc_feature (1274)..(1274): n is a, c, g, or t
  misc_feature (1277)..(1277): n is a, c, g, or t
  misc_feature (1292)..(1292): n is a, c, g, or t
  misc_feature (1297)..(1297): n is a, c, g, or t
  misc_feature (1305)..(1306): n is a, c, g, or t
  misc_feature (1309)..(1310): n is a, c, g, or t
  misc_feature (1314)..(1314): n is a, c, g, or t
  misc_feature (1318)..(1319): n is a, c, g, or t
  misc_feature (1324)..(1324): n is a, c, g, or t
  misc_feature (1331)..(1332): n is a, c, g, or t
  misc_feature (1339)..(1339): n is a, c, g, or t
  misc_feature (1343)..(1343): n is a, c, g, or t
  misc_feature (1356)..(1356): n is a, c, g, or t
  misc_feature (1362)..(1362): n is a, c, g, or t
  misc_feature (1367)..(1367): n is a, c, g, or t
  misc_feature (1390)..(1390): n is a, c, g, or t
  misc_feature (1392)..(1392): n is a, c, g, or t
  misc_feature (1396)..(1396): n is a, c, g, or t
nantagagaaattactatgagaggatcgcatcaccatcaccatcacggatcctatttaggtgacactatagaatcgtcgacccacgcgtccgaccgatctgggctggtcgcgacctacgctgatccaggagaaggccatcccactggccctagaagggaaggacctcctggctcgggcccgcacgggctccgggaagacggccgcttatgctattccgatgctgcagctgttgctccataggaaggcgacaggtccggtggtagaacaggcagtgagaggccttgttcttgttcctaccaaggagctggcacggcaagcacagtccatgattcagcagctggctacctactgtgctcgggatgtccgagtggccaatgtctcagctgctgaagactcagtctctcagagagctgtgctgatggagaagccagatgtggtagtagggaccccatctcgcatattaagccacttgcagcaagacagcctgaaacttcgtgactccctggagcttttggtggtggacgaagctgaccttcttttttcctttggctttgaagaagagctcaagagtctcctctgtcacttgccccggatttaccaggcttttctcatgtcagctacttttaacgaggacgtacaagcactcaaggagctgatattacataacccggttacccttaagttacaggagtcccagctgcctgggccagaccagttacagcagtttcaggtggtctgtgagactgangaagacaaattcctcctgctgtatgccctgctcaagctgtcattgattcggggcaagtctctgctctttgtcaacactctagaacggagttaccngctacgcctgttcttggaacagttcancatccccacctgtgtgctcaatggagancttccactgcgctccaggtgccccatcatctcacagttcaaccaaggcttctacgantgtgtcataaccacctgatgctnaaattcctggggggccccnagtcaaggggaanccgtcngggnccnanggcccaaaggggnaaaaggncctntgatccggaaaccaaggggtggcccgggggnanaaacttccncnatgggtntgctgggctcaactttnaatnttccccnaacccctgangcctaaatccatcnanggtgggagaannccccnccctaaancccangnataattttaacntttggnttnccngnaacaattncncttngganaatnnaaaacttntnntggaaaaaaangggcccctttgcnccncanattcgaaagaaaaanaaggntttccttnnctnngganacanncccanaaaaaanngcctttngganaaaaaaaaaaaanaaaatnctttnaaataaaaattttaaaccgggcncngggnggac

SEQ ID NO: 51 - DNA, 980 bp, Homo Sapiens
  misc_feature (98)..(98): n is a, c, g, or t
  misc_feature (835)..(835): n is a, c, g, or t
  misc_feature (898)..(898): n is a, c, g, or t
  misc_feature (922)..(922): n is a, c, g, or t
  misc_feature (947)..(947): n is a, c, g, or t
  misc_feature (957)..(957): n is a, c, g, or t
  misc_feature (970)..(970): n is a, c, g, or t
  misc_feature (972)..(972): n is a, c, g, or t
tagagagaattactatgagaggatcgcatcaccatcaccatcacggatcctatttaggtgacactatagaatcgtcgacccacgcgtccggtccccgntttcccctcccccttcccttctccggttgccttcccgggccccttacactccacagtcccggtcccgccatgtcccagaaacaagaagcaggacacgcaggagaaagaaggtattctgcctgagagagctgaagaggcaaagctaaaggccaaatacccaagcctaggacaaaagcctggaggctccgacttcctcatgaagagactccagaaagggcaaaagtactttgactcaggagactacaacatggccaaagccaagatgaagaataagcagctgccaagtgcaggaccagacaagaacctggtgactggtgatcacatccccaccccacaggatctgccccagagaaagtcctcgctcgtcaccagcaagcttgcgggtggccaagttgaatgatgctgcccggggctctgccagatcctgagacgcttcccctccctgccccacccgggtcctgtgctggctcctgccccttcctgcttttgcagccaggggtcaggaggtggctcgggtgtgggctggagaggcagaagccctttcctgttggtgtcccagcacatggagccccttgggctgagcaccaagaccttgaaccttttttgttttaccttttttccaaataacagttgggagaaatatcaatgaaattctgggggtgggggtggggttgaaagggtggggtgggagatatggaggagtatgaattagggcttggagttggtaaaaacattcntgactatccttcttaaccacgtggctgatgtggggtaggtatgaggggaaggaagtggagtancctaatgaaagggttctagttganctctgtaaataaatgccttgttcantgtggttggnaaactggtgtcananaaaaaaac

SEQ ID NO: 52 - DNA, 1200 bp, Homo Sapiens
  misc_feature (411)..(411): n is a, c, g, or t
  misc_feature (468)..(468): n is a, c, g, or t
  misc_feature (585)..(585): n is a, c, g, or t
  misc_feature (634)..(634): n is a, c, g, or t
  misc_feature (647)..(647): n is a, c, g, or t
  misc_feature (655)..(655): n is a, c, g, or t
  misc_feature (661)..(661): n is a, c, g, or t
  misc_feature (664)..(664): n is a, c, g, or t
  misc_feature (678)..(678): n is a, c, g, or t
  misc_feature (708)..(708): n is a, c, g, or t
  misc_feature (713)..(713): n is a, c, g, or t
  misc_feature (721)..(721): n is a, c, g, or t
  misc_feature (724)..(724): n is a, c, g, or t
  misc_feature (741)..(741): n is a, c, g, or t
  misc_feature (748)..(749): n is a, c, g, or t
  misc_feature (771)..(771): n is a, c, g, or t
  misc_feature (774)..(774): n is a, c, g, or t
  misc_feature (808)..(808): n is a, c, g, or t
  misc_feature (810)..(811): n is a, c, g, or t
  misc_feature (815)..(817): n is a, c, g, or t
  misc_feature (822)..(822): n is a, c, g, or t
  misc_feature (838)..(838): n is a, c, g, or t
  misc_feature (842)..(842): n is a, c, g, or t
  misc_feature (847)..(847): n is a, c, g, or t
  misc_feature (853)..(853): n is a, c, g, or t
  misc_feature (864)..(864): n is a, c, g, or t
  misc_feature (887)..(889): n is a, c, g, or t
  misc_feature (895)..(895): n is a, c, g, or t
  misc_feature (897)..(897): n is a, c, g, or t
  misc_feature (900)..(900): n is a, c, g, or t
  misc_feature (902)..(902): n is a, c, g, or t
  misc_feature (905)..(905): n is a, c, g, or t
  misc_feature (907)..(907): n is a, c, g, or t
  misc_feature (918)..(918): n is a, c, g, or t
  misc_feature (927)..(927): n is a, c, g, or t
  misc_feature (934)..(934): n is a, c, g, or t
  misc_feature (946)..(946): n is a, c, g, or t
  misc_feature (954)..(954): n is a, c, g, or t
  misc_feature (956)..(956): n is a, c, g, or t
  misc_feature (961)..(961): n is a, c, g, or t
  misc_feature (973)..(973): n is a, c, g, or t
  misc_feature (983)..(983): n is a, c, g, or t
  misc_feature (1002)..(1002): n is a, c, g, or t
  misc_feature (1009)..(1009): n is a, c, g, or t
  misc_feature (1018)..(1018): n is a, c, g, or t
  misc_feature (1029)..(1029): n is a, c, g, or t
  misc_feature (1040)..(1041): n is a, c, g, or t
  misc_feature (1047)..(1047): n is a, c, g, or t
  misc_feature (1049)..(1050): n is a, c, g, or t
  misc_feature (1053)..(1054): n is a, c, g, or t
  misc_feature (1061)..(1061): n is a, c, g, or t
  misc_feature (1071)..(1073): n is a, c, g, or t
  misc_feature (1075)..(1076): n is a, c, g, or t
  misc_feature (1083)..(1083): n is a, c, g, or t
  misc_feature (1090)..(1092): n is a, c, g, or t
  misc_feature (1114)..(1115): n is a, c, g, or t
  misc_feature (1117)..(1117): n is a, c, g, or t
  misc_feature (1127)..(1128): n is a, c, g, or t
  misc_feature (1139)..(1141): n is a, c, g, or t
  misc_feature (1144)..(1144): n is a, c, g, or t
  misc_feature (1147)..(1148): n is a, c, g, or t
  misc_feature (1155)..(1155): n is a, c, g, or t
  misc_feature (1157)..(1157): n is a, c, g, or t
  misc_feature (1159)..(1159): n is a, c, g, or t
  misc_feature (1161)..(1161): n is a, c, g, or t
  misc_feature (1168)..(1169): n is a, c, g, or t
  misc_feature (1172)..(1172): n is a, c, g, or t
  misc_feature (1174)..(1174): n is a, c, g, or t
  misc_feature (1178)..(1178): n is a, c, g, or t
  misc_feature (1185)..(1187): n is a, c, g, or t
  misc_feature (1190)..(1191): n is a, c, g, or t
  misc_feature (1196)..(1196): n is a, c, g, or t
caatagagaaattactatgagaggatcgcatcaccatcaccatcacggatcctatttaggtgacactatagaatcgtcgacccacgcgtccggcaagaatgaggtgctgcgcagcaaggtgtctcggctcacggagcggctccgcaagcgctaccccaccaacaacttcgggaactgcacgggctgctcggccaccttctcagtgctgaagaagaggcggagctgcagtaattgtggaaacagcttctgctctcgatgctgctccttcaaggtgcccaagtcctccatgggggccacagcccctgaagcccagagggagactgtgtttgtgtgtgcctcgtgtaaccagaccttgagcaagtgagaagagaggccagggtccaaccaggcacccgtccttggggccagcantagaccccccactctccccacccctggcccactgtggtgtgtgctgggcaaatgtgncctgaatgctaggtaggcttccccttccttcctcactctctccagctggattctggagctgttctccatccatgagagtggctggcaatggctgctctcaatcccttgagggagaanagcccctgtagggcctggcatgtttgccctgctctgcctggggactgancgagtggacttanggctgggnaggcantanccaccagaaggcancagcgaactaggccaggcctgactggggtntgaanatcagggncantgtggctatgcctgtgnaattccnngaacctgaggttggtgaaaaanagntttttctcctgaaaggtactgggccaaggccctnanncctnnnaaaanccctgcaaaaaaggcnttgngagtncccaanccccatctttnctgaattgaaatgtcccttcaannnaaccangnatntnctntnatttcccccantcagaaggnttgtggnccaggccctaangaaaaccntnggtgnctttctaaaaanccgggttttnaaattccccaaaaatcccnttaaaangaaaaggtnaaaaagagacngttttgggctnnacaccntnnatnngtttaangaaagtaaannntnngggaaancccaatnnnttggacaaaccccttccccccnntnaaaaaccttnntttaaaaattnnncanccnncaaaaantncnanttccccnnatncncttngaaaatnnnacnnggaanttgg

SEQ ID NO: 53 - DNA, 1274 bp, Homo Sapiens
  misc_feature (823)..(823): n is a, c, g, or t
  misc_feature (947)..(947): n is a, c, g, or t
  misc_feature (950)..(950): n is a, c, g, or t
  misc_feature (986)..(986): n is a, c, g, or t
  misc_feature (993)..(993): n is a, c, g, or t
  misc_feature (995)..(995): n is a, c, g, or t
  misc_feature (998)..(998): n is a, c, g, or t
  misc_feature (1006)..(1006): n is a, c, g, or t
  misc_feature (1019)..(1019): n is a, c, g, or t
  misc_feature (1026)..(1026): n is a, c, g, or t
  misc_feature (1048)..(1048): n is a, c, g, or t
  misc_feature (1058)..(1058): n is a, c, g, or t
  misc_feature (1073)..(1073): n is a, c, g, or t
  misc_feature (1088)..(1088): n is a, c, g, or t
  misc_feature (1092)..(1092): n is a, c, g, or t
  misc_feature (1094)..(1094): n is a, c, g, or t
  misc_feature (1099)..(1100): n is a, c, g, or t
  misc_feature (1114)..(1114): n is a, c, g, or t
  misc_feature (1119)..(1119): n is a, c, g, or t
  misc_feature (1123)..(1123): n is a, c, g, or t
  misc_feature (1137)..(1137): n is a, c, g, or t
  misc_feature (1161)..(1161): n is a, c, g, or t
  misc_feature (1163)..(1163): n is a, c, g, or t
  misc_feature (1174)..(1174): n is a, c, g, or t
  misc_feature (1179)..(1179): n is a, c, g, or t
  misc_feature (1184)..(1184): n is a, c, g, or t
  misc_feature (1207)..(1207): n is a, c, g, or t
  misc_feature (1231)..(1231): n is a, c, g, or t
  misc_feature (1237)..(1238): n is a, c, g, or t
  misc_feature (1247)..(1247): n is a, c, g, or t
  misc_feature (1249)..(1249): n is a, c, g, or t
  misc_feature (1255)..(1255): n is a, c, g, or t
  misc_feature (1261)..(1261): n is a, c, g, or t
  misc_feature (1267)..(1267): n is a, c, g, or t
  misc_feature (1272)..(1272): n is a, c, g, or t
tagagaaattactatgagaggatcgcatcaccatcaccatcacggatcctatttaggtgacactatagaatcgtcgacccacgcgtccgaggcactgcgggagcgctggctgctggaggggacgccgtcctcggcctcagagggggatgaggacctgaggaggcagatgcaggacgacgagcagaagacacggctgctggaggactcggtgtccaggttggagaaggaaattgaggtgctggagcgtggagactccgccccagccactgccaaggagaacgcggcggccccgagcccagtccgggccccagccccgagtccagccaaggaggagcgcaagacagaggtggtgatgaattcacagcagacgccggtgggcacgcccaaagacaagcgagtctccaacacgcccctgaggacggttgacggctcccccatgatgaaggcagtggtccatgctgtggacggcaccgccgagaacgggatccaccccctgagctcctccgaggtggacgaactcatccacaaagcggacgaggtcacgctgagcgaggcagggtccacggccggggcggcagagacccggggggctgtggagggggcagcccggaccacgccctcccggcgggagatcaccggtgtgcaggcacagccaggcgaggccacgtccggcccgccggggatccagcccggccaggagcccccggtcacaatgatcttcatgggttaccagaacgtggaggatgaggccgagaccaagaaggtgctgggccttcaagataccatcacggcggagctggtggtcatcgaagacgcggctgancccaaggagcctgcaccacccaacggcagtgctgccgagcctcccacggaggccgccctccagggaagagaatcaggcggggcccgaggccaccaccagcgacccccagaacttcgacatgaanaancaccgttgtaaatgctgctccatcatgtgagccggnccccgananccnggccccanccccaaacaaaanaaaccancagcccgggcccttccggggcntggcccaccntccaccaaaagcctnaggggtccagaattngggngnttttnnatgttcctttccanttttntttncctggaaaaaaggnaaaggggcccccacccgttaacangncccaaaaattnccccnaaaanaaaaacctttcatttttttcttnttaaaaaaaaaaaagaaaaacccntttttnncaaaaaagnancccccntttttngggggnttttnaa

SEQ ID NO: 54 - DNA, 1392 bp, Homo Sapiens
  misc_feature (754)..(754): n is a, c, g, or t
  misc_feature (873)..(873): n is a, c, g, or t
  misc_feature (889)..(889): n is a, c, g, or t
  misc_feature (902)..(902): n is a, c, g, or t
  misc_feature (923)..(923): n is a, c, g, or t
  misc_feature (948)..(949): n is a, c, g, or t
  misc_feature (953)..(953): n is a, c, g, or t
  misc_feature (963)..(963): n is a, c, g, or t
  misc_feature (972)..(972): n is a, c, g, or t
  misc_feature (989)..(989): n is a, c, g, or t
  misc_feature (1024)..(1024): n is a, c, g, or t
  misc_feature (1031)..(1031): n is a, c, g, or t
  misc_feature (1037)..(1037): n is a, c, g, or t
  misc_feature (1051)..(1051): n is a, c, g, or t
  misc_feature (1058)..(1058): n is a, c, g, or t
  misc_feature (1061)..(1061): n is a, c, g, or t
  misc_feature (1069)..(1070): n is a, c, g, or t
  misc_feature (1078)..(1078): n is a, c, g, or t
  misc_feature (1080)..(1080): n is a, c, g, or t
  misc_feature (1082)..(1082): n is a, c, g, or t
  misc_feature (1099)..(1100): n is a, c, g, or t
  misc_feature (1122)..(1122): n is a, c, g, or t
  misc_feature (1130)..(1130): n is a, c, g, or t
  misc_feature (1133)..(1133): n is a, c, g, or t
  misc_feature (1138)..(1138): n is a, c, g, or t
  misc_feature (1144)..(1144): n is a, c, g, or t
  misc_feature (1152)..(1152): n is a, c, g, or t
  misc_feature (1170)..(1170): n is a, c, g, or t
  misc_feature (1175)..(1176): n is a, c, g, or t
  misc_feature (1183)..(1184): n is a, c, g, or t
  misc_feature (1186)..(1186): n is a, c, g, or t
  misc_feature (1189)..(1190): n is a, c, g, or t
  misc_feature (1192)..(1192): n is a, c, g, or t
  misc_feature (1194)..(1194): n is a, c, g, or t
  misc_feature (1196)..(1197): n is a, c, g, or t
  misc_feature (1207)..(1207): n is a, c, g, or t
  misc_feature (1234)..(1234): n is a, c, g, or t
  misc_feature (1250)..(1250): n is a, c, g, or t
  misc_feature (1258)..(1259): n is a, c, g, or t
  misc_feature (1262)..(1262): n is a, c, g, or t
  misc_feature (1264)..(1264): n is a, c, g, or t
  misc_feature (1269)..(1269): n is a, c, g, or t
  misc_feature (1279)..(1280): n is a, c, g, or t
  misc_feature (1289)..(1289): n is a, c, g, or t
  misc_feature (1301)..(1301): n is a, c, g, or t
  misc_feature (1310)..(1310): n is a, c, g, or t
  misc_feature (1313)..(1314): n is a, c, g, or t
  misc_feature (1317)..(1317): n is a, c, g, or t
  misc_feature (1329)..(1331): n is a, c, g, or t
  misc_feature (1339)..(1339): n is a, c, g, or t
  misc_feature (1345)..(1345): n is a, c, g, or t
  misc_feature (1355)..(1355): n is a, c, g, or t
  misc_feature (1368)..(1368): n is a, c, g, or t
  misc_feature (1371)..(1371): n is a, c, g, or t
  misc_feature (1376)..(1376): n is a, c, g, or t
  misc_feature (1392)..(1392): n is a, c, g, or t
gagaaattactatgagaggatcgcatcaccatcaccatcacggatcctatttaggtgacactatagaatcgtcgacccacgcgtccggtgttgggactgctgataggaagatgtcttcaggaaatgctaaaattgggcaccctgcccccaacttcaaagccacagctgttatgccagatggtcagtttaaagatatcagcctgtctgactacaaaggaaaatatgttgtgttcttcttttaccctcttgacttcacctttgtgtgccccacggagatcattgctttcagtgatagggcagaagaatttaagaaactcaactgccaagtgattggtgcttctgtggattctcacttctgtcatctagcatgggtcaatacacctaagaaacaaggaggactgggacccatgaacattcctttggtatcagacccgaagcgcaccattgctcaggattatggggtcttaaaggctgatgaaggcatctcgttcaggggcctttttatcattgatgataagggtattcttcggcagatcactgtaaatgacctccctgttggccgctctgtggatgagactttgagactagttcaggccttccagttcactgacaaacatggggaagtgtgcccagctggctggaaacctggcagtgataccatcaagcctgatgtccaaaagagcaaagaatatttctccaagcaaaagtgagcgctgggctgttttagtgccaggctgcggtgggcagccatganaacaaaacctcttctgtatttttttttttccattagtaaaacacaagacttcagattcagccgaattgtggtgtcttacaaggcaggcctttcctacagggggtggagaaacccagccntttcttcctttggtangaatggcccgaanttggcggttgtgggcagcctnctgggttttggtatgatggaataannaganccaccccatnaatcctttnggaagtttggattaaancttgaaatggaaaaaaaaaaaaaaaaaaaaagggncggcccncccccnaaaagggaagccgnattaaanctnaattaacnngaacttgnancnccggttgaaaaaatccnnaaaaagaaccccaaaaaccccntccggganttnttccnaaaccncccggttnccccccgggggttttttntgggnnaaaaccnncncanntngngnnaattttccgnaccaagaaaaccaaaggggaaaaaaanacccggaaaacccccngttaaaannccnanggacnccaaaaaaannttttggggnttttcccccgtnggccagggnccnnaanacaaacccgccnnnggaaaaancccctntttaaacacnaaaaaaaaaaacnccnttttnccgccctttatccttn

SEQ ID NO: 55 - DNA, 1192 bp, Homo Sapiens
  misc_feature (888)..(888): n is a, c, g, or t
  misc_feature (922)..(922): n is a, c, g, or t
  misc_feature (947)..(947): n is a, c, g, or t
  misc_feature (963)..(963): n is a, c, g, or t
  misc_feature (1019)..(1019): n is a, c, g, or t
  misc_feature (1023)..(1023): n is a, c, g, or t
  misc_feature (1042)..(1042): n is a, c, g, or t
  misc_feature (1057)..(1057): n is a, c, g, or t
  misc_feature (1059)..(1059): n is a, c, g, or t
  misc_feature (1074)..(1074): n is a, c, g, or t
  misc_feature (1088)..(1088): n is a, c, g, or t
  misc_feature (1090)..(1090): n is a, c, g, or t
  misc_feature (1093)..(1093): n is a, c, g, or t
  misc_feature (1095)..(1095): n is a, c, g, or t
  misc_feature (1101)..(1101): n is a, c, g, or t
  misc_feature (1103)..(1103): n is a, c, g, or t
  misc_feature (1105)..(1105): n is a, c, g, or t
  misc_feature (1109)..(1109): n is a, c, g, or t
  misc_feature (1120)..(1120): n is a, c, g, or t
  misc_feature (1124)..(1124): n is a, c, g, or t
  misc_feature (1132)..(1132): n is a, c, g, or t
  misc_feature (1141)..(1142): n is a, c, g, or t
  misc_feature (1145)..(1145): n is a, c, g, or t
  misc_feature (1148)..(1148): n is a, c, g, or t
  misc_feature (1152)..(1152): n is a, c, g, or t
  misc_feature (1168)..(1168): n is a, c, g, or t
  misc_feature (1171)..(1171): n is a, c, g, or t
  misc_feature (1183)..(1183): n is a, c, g, or t
atagagagaattactatgagaggatcgcatcaccatcaccatcacggatcctatttaggtgacactatagaatcgtcgacccacgcgtccgggcaaaaagcaattgcagaagttgatgtgggtacagataaggcccagaattctgacccgatacttgatacttcatcactagttcctggatgttcctctgtagataacatcaagtcatctcaaacctcacaaaaccagggacttggacgtcctactcttgaaggtgatgaagagacttcagaggttgagtacacagtgaataagggcccagcttccagcaatagagacagggtaccaccttcatctgaagctagtgagcatcacccgcggcatcgtgtttcaagtcaagcggaagatacttccagcagctttgacaacctgtttattgacaggttacagaggatcaccattgcggaccaaggtgaacaacagtcagaagaaaacgcaagtactaagaacttgacaggcctttccagtgggactgagaagaaacctcattacatggaagtgctagaaatgcgagccaaaaacccagtgccccagctgcgtaaatttaaaaccaatgtgttaccttttcgacaaaatgattcatctagtcattgccagaagagtgggtctcctatttcctcagaagagcggcggcgcagggataagcagcatcttgatgacatcacagcagctcggcttctaccacttcaccatatgcccacgcagctgctctccatagaagaatccttggcacttcagaaacagcagaaacagaattatgaggagatgcaagcaaagctcgcagcgcaaaaattagctgaaagactgaatattaaaatgcggagttataatccagaaggggagtcttcngggagataccgagaagtaagggatgaagatgacnattggtcctctgatgaattctgaanataatctcctaaatcnctgacgttgaaatgtcatcatcttacatcaaactttctaactagtatcagatcagngtcnaaattgttgagggaagtantttataaagttaccnanggtagtttaaaaaanccccatttgtcttncnaangngacttncngngctngaaaggttaantttngaaattgngtttacccnnggnatnaaantttgcaaaaattgggnatnggccggaatttnaaaaaaaaa

SEQ ID NO: 56 - DNA, 1200 bp, Homo Sapiens
  misc_feature (805)..(809): n is a, c, g, or t
  misc_feature (814)..(847): n is a, c, g, or t
  misc_feature (894)..(894): n is a, c, g, or t
  misc_feature (916)..(916): n is a, c, g, or t
  misc_feature (918)..(918): n is a, c, g, or t
  misc_feature (925)..(925): n is a, c, g, or t
  misc_feature (935)..(935): n is a, c, g, or t
  misc_feature (943)..(943): n is a, c, g, or t
  misc_feature (962)..(962): n is a, c, g, or t
  misc_feature (979)..(979): n is a, c, g, or t
  misc_feature (987)..(987): n is a, c, g, or t
  misc_feature (994)..(994): n is a, c, g, or t
  misc_feature (1009)..(1009): n is a, c, g, or t
  misc_feature (1016)..(1016): n is a, c, g, or t
  misc_feature (1020)..(1021): n is a, c, g, or t
  misc_feature (1025)..(1025): n is a, c, g, or t
  misc_feature (1055)..(1055): n is a, c, g, or t
  misc_feature (1059)..(1060): n is a, c, g, or t
  misc_feature (1075)..(1075): n is a, c, g, or t
  misc_feature (1082)..(1082): n is a, c, g, or t
  misc_feature (1089)..(1089): n is a, c, g, or t
  misc_feature (1093)..(1093): n is a, c, g, or t
  misc_feature (1100)..(1100): n is a, c, g, or t
  misc_feature (1102)..(1102): n is a, c, g, or t
  misc_feature (1105)..(1106): n is a, c, g, or t
  misc_feature (1111)..(1113): n is a, c, g, or t
  misc_feature (1116)..(1116): n is a, c, g, or t
  misc_feature (1124)..(1124): n is a, c, g, or t
  misc_feature (1127)..(1128): n is a, c, g, or t
  misc_feature (1130)..(1130): n is a, c, g, or t
  misc_feature (1137)..(1137): n is a, c, g, or t
  misc_feature (1146)..(1147): n is a, c, g, or t
  misc_feature (1151)..(1151): n is a, c, g, or t
  misc_feature (1159)..(1159): n is a, c, g, or t
  misc_feature (1171)..(1171): n is a, c, g, or t
  misc_feature (1174)..(1175): n is a, c, g, or t
  misc_feature (1184)..(1184): n is a, c, g, or t
  misc_feature (1191)..(1191): n is a, c, g, or t
  misc_feature (1196)..(1196): n is a, c, g, or t
tagagaaattactatgagaggatcgcatcaccatcaccatcacggatcctatttaggtgacactatagaatcgtcgacccacgcgtccgccatgacgaccgcgtccacctcgcaggtgcgccagaactaccaccaggactcagaggccgccatcaaccgccagatcaacctggagctctacgcctcctacgtttacctgtccatgtcttactactttgaccgcgatgatgtggctttgaagaactttgccaaatactttcttcaccaatctcatgaggagagggaacatgctgagaaactgatgaagctgcagaaccaacgaggtggccgaatcttccttcaggatatcaagaaaccagactgtgatgactgggagagcgggctgaatgcaatggagtgtgcattacatttggaaaaaaatgtgaatcagtcactactggaactgcacaaactggccactgacaaaaatgacccccatttgtgtgacttcattgagacacattacctgaatgagcaggtgaaagccatcaaagaattgggtgaccacgtgaccaacttgcgcaagatgggagcgcccgaatctggcttggcggaatatctctttgacaagcacaccctgggagacagtgataatgaaagctaagcctcgggctaatttccccatagccgtggggtgacttccctggtcaccaaggcagtgcatgcatgttggggtttcctttaccttttctataagttgtaccaaaacatccacttaagttctttgatttgtaccattccttcaaataaagaaatttggtacccnnnnnaaaannnnnnnnnnnnnnnnnnnnnnnnnnnnnnnnnnaaaaagggcggccgctccctaaagtgagtcgtattaagcttaattanctgaacttggactcctgttgananatccagnaatgacctcnaaactccntctggatttgttcaaaacnctcggttgcccccgggngttttttntgggganaatccaacctagctnggcgaantttnngganctaaggaagctaaatggaaaaaaaatcccnggannacccccgttgaaatntcccaanggctccnaaanaaatttngnggnntttcnnnccnttgcccanggnncnaaaaccnaaccgttcnntggnattttcgncctttttaaaanccnnaaaaaaaanaacccanttttntccg

SEQ ID NO: 57 - DNA, 1286 bp, Homo Sapiens
  misc_feature (823)..(823): n is a, c, g, or t
  misc_feature (848)..(848): n is a, c, g, or t
  misc_feature (864)..(864): n is a, c, g, or t
  misc_feature (905)..(905): n is a, c, g, or t
  misc_feature (949)..(949): n is a, c, g, or t
  misc_feature (965)..(965): n is a, c, g, or t
  misc_feature (967)..(967): n is a, c, g, or t
  misc_feature (982)..(982): n is a, c, g, or t
  misc_feature (984)..(984): n is a, c, g, or t
  misc_feature (989)..(989): n is a, c, g, or t
  misc_feature (1006)..(1006): n is a, c, g, or t
  misc_feature (1014)..(1014): n is a, c, g, or t
  misc_feature (1045)..(1045): n is a, c, g, or t
  misc_feature (1050)..(1050): n is a, c, g, or t
  misc_feature (1066)..(1066): n is a, c, g, or t
  misc_feature (1079)..(1079): n is a, c, g, or t
  misc_feature (1091)..(1091): n is a, c, g, or t
  misc_feature (1093)..(1093): n is a, c, g, or t
  misc_feature (1095)..(1095): n is a, c, g, or t
  misc_feature (1097)..(1097): n is a, c, g, or t
  misc_feature (1121)..(1121): n is a, c, g, or t
  misc_feature (1124)..(1124): n is a, c, g, or t
  misc_feature (1138)..(1138): n is a, c, g, or t
  misc_feature (1141)..(1141): n is a, c, g, or t
  misc_feature (1143)..(1143): n is a, c, g, or t
  misc_feature (1145)..(1145): n is a, c, g, or t
  misc_feature (1150)..(1151): n is a, c, g, or t
  misc_feature (1159)..(1159): n is a, c, g, or t
  misc_feature (1168)..(1168): n is a, c, g, or t
  misc_feature (1173)..(1174): n is a, c, g, or t
  misc_feature (1183)..(1183): n is a, c, g, or t
  misc_feature (1191)..(1191): n is a, c, g, or t
  misc_feature (1195)..(1196): n is a, c, g, or t
  misc_feature (1203)..(1203): n is a, c, g, or t
  misc_feature (1206)..(1206): n is a, c, g, or t
  misc_feature (1210)..(1210): n is a, c, g, or t
  misc_feature (1218)..(1218): n is a, c, g, or t
  misc_feature (1220)..(1220): n is a, c, g, or t
  misc_feature (1231)..(1231): n is a, c, g, or t
  misc_feature (1233)..(1233): n is a, c, g, or t
  misc_feature (1241)..(1241): n is a, c, g, or t
  misc_feature (1252)..(1253): n is a, c, g, or t
  misc_feature (1255)..(1255): n is a, c, g, or t
  misc_feature (1263)..(1263): n is a, c, g, or t
  misc_feature (1269)..(1270): n is a, c, g, or t
  misc_feature (1274)..(1274): n is a, c, g, or t
tagagaaattactatgagaggatcgcatcaccatcaccatcacggatcctatttaggtgacactatagaatcgtcgacccacgcgtccgaagaaaaccagcgcaaggaatcctctagttttaagactgaagatggaaaaagtattttatctgccttagacaaaggctctacacatactgcatgctcaggacccatagatgaactattagacatgaaatctgaggaaggtgcttgcctgggaccagtggcagggaccccggaacctgaaggtgctgacaaagatgacctgctgctgttgagtgagatcttcaatgcttcctccttggaagagggcgagttcagcaaagagtgggccgctgtgtttggagacggccaagtgaaggagccagtgcccactatggccctgggagagccagaccccaaggcccagacaggctcaggtttccttccttcgcagcttttagaccaaaatatgaaagacttacaggcctcgctacaagaacctgctaaggctgcctcagacctgactgcctggttcagcctcttcgctgacctcgacccactctcaaatcctgatgctgttgggaaaaccgataaagaacacgaattgctcaatgcatgaatctgtacccttcgggagggcactcacatgccgcccccagcagctcccctgggggctagcagaagtataaagtgatcagtatgctgttttaataattatgtgccattttaataaaatgaaagggtcaacggccctgtttatattggtataattatttactcttatttggtataaaagggttttcgtgtatctctatgtggnatctaaataatacaggattgtctanaagcggttttccaggnccaccgctctcctgcctacatcccatcatggctgctgcggnggtcactggggctacccgtgagatccaagtttgaaatccaaaancctactttgatggtangntttgaaatgacggtntnctaanagccctccaaaaggccngcagggangcctaaccaaaagcttttaaattggccttcnttttnttgccccccaaccctntgttccccctttnggaagaagggcntntnanggaaaaatttccctttttctggcnaangcccacctttccanggnancncctgnnataaaaantcttggccnaaccnnaaaaaattngtcccccnacannaaggggnccngggngggccccncngttttcccccncngggggaangaaatggggtnntntcctcccnggggcnnaaancctttatttttg

SEQ ID NO: 58 - DNA, 1030 bp, Homo Sapiens
  misc_feature (7)..(9): n is a, c, g, or t
  misc_feature (13)..(13): n is a, c, g, or t
  misc_feature (630)..(630): n is a, c, g, or t
  misc_feature (637)..(637): n is a, c, g, or t
  misc_feature (642)..(642): n is a, c, g, or t
  misc_feature (644)..(644): n is a, c, g, or t
  misc_feature (658)..(658): n is a, c, g, or t
  misc_feature (675)..(675): n is a, c, g, or t
  misc_feature (699)..(699): n is a, c, g, or t
  misc_feature (706)..(706): n is a, c, g, or t
  misc_feature (708)..(708): n is a, c, g, or t
  misc_feature (711)..(711): n is a, c, g, or t
  misc_feature (713)..(713): n is a, c, g, or t
  misc_feature (718)..(718): n is a, c, g, or t
  misc_feature (720)..(720): n is a, c, g, or t
  misc_feature (729)..(729): n is a, c, g, or t
  misc_feature (733)..(733): n is a, c, g, or t
  misc_feature (736)..(736): n is a, c, g, or t
  misc_feature (744)..(744): n is a, c, g, or t
  misc_feature (751)..(752): n is a, c, g, or t
  misc_feature (755)..(755): n is a, c, g, or t
  misc_feature (762)..(762): n is a, c, g, or t
  misc_feature (773)..(773): n is a, c, g, or t
  misc_feature (776)..(776): n is a, c, g, or t
  misc_feature (781)..(781): n is a, c, g, or t
  misc_feature (791)..(794): n is a, c, g, or t
  misc_feature (796)..(796): n is a, c, g, or t
  misc_feature (798)..(799): n is a, c, g, or t
  misc_feature (801)..(801): n is a, c, g, or t
  misc_feature (803)..(803): n is a, c, g, or t
  misc_feature (807)..(808): n is a, c, g, or t
  misc_feature (811)..(811): n is a, c, g, or t
  misc_feature (814)..(814): n is a, c, g, or t
  misc_feature (820)..(820): n is a, c, g, or t
  misc_feature (831)..(831): n is a, c, g, or t
  misc_feature (844)..(844): n is a, c, g, or t
  misc_feature (847)..(849): n is a, c, g, or t
  misc_feature (852)..(852): n is a, c, g, or t
  misc_feature (854)..(856): n is a, c, g, or t
  misc_feature (859)..(859): n is a, c, g, or t
  misc_feature (863)..(864): n is a, c, g, or t
  misc_feature (870)..(871): n is a, c, g, or t
  misc_feature (875)..(875): n is a, c, g, or t
  misc_feature (880)..(880): n is a, c, g, or t
  misc_feature (882)..(882): n is a, c, g, or t
  misc_feature (885)..(886): n is a, c, g, or t
  misc_feature (890)..(890): n is a, c, g, or t
  misc_feature (906)..(906): n is a, c, g, or t
  misc_feature (908)..(908): n is a, c, g, or t
  misc_feature (912)..(917): n is a, c, g, or t
  misc_feature (926)..(927): n is a, c, g, or t
  misc_feature (929)..(929): n is a, c, g, or t
  misc_feature (931)..(932): n is a, c, g, or t
  misc_feature (934)..(935): n is a, c, g, or t
  misc_feature (937)..(937): n is a, c, g, or t
  misc_feature (941)..(942): n is a, c, g, or t
  misc_feature (944)..(944): n is a, c, g, or t
  misc_feature (946)..(946): n is a, c, g, or t
  misc_feature (964)..(964): n is a, c, g, or t
  misc_feature (967)..(967): n is a, c, g, or t
  misc_feature (969)..(972): n is a, c, g, or t
  misc_feature (978)..(978): n is a, c, g, or t
  misc_feature (980)..(980): n is a, c, g, or t
  misc_feature (984)..(985): n is a, c, g, or t
  misc_feature (989)..(1009): n is a, c, g, or t
  misc_feature (1011)..(1011): n is a, c, g, or t
  misc_feature (1015)..(1017): n is a, c, g, or t
  misc_feature (1021)..(1028): n is a, c, g, or t
cattttnnnggantaactatgagagggatcgcatcaccatcaccatcacgggatcctatttaggtgacactatagaatcgtcgacccacgcgtccgcccacgcgtccgcccacgcgtccgctccgcgcctcgcgctatgggacagagcccccgatccgccagcaccacctgaggatccagaaaccgccccagcgatggaagaggatcaggagctggagaggaaagcaatagaagaactgcttaaggaggcaaaacgtgggaaaactagagctgaaacaatgggacccatgggttggatgaagtgtcctcttgctagcaccaataaaagatttctaattaacacaattaaaaacacattgccctctcataaagagcaagaccatgaacaaaaagagggcgataaggaaccagccaagagccaggcccagaaagaagaaaacccaaagaaacacagaagccatccttacaagcacagcttccgcgctcgaggttccgccagttactccccgccacgaaagcggagcagccaggacaagtacgaaaagcggtccaaccggcggtgaggctggaaccagggccagccagccctgcgggcctccgtgctccttcggggtgcggtgtgcggagaangcctganctggnanggcaaacacctganagtgactttgacattangtcctttgttgtttttaaagaggntgctggncncangnaaaananaaaaatganctancanctcttgangaaacanntgnaaaggangatgtcttggnaanttaanctacttctgnnnngnannananttanntantgntgttancttgttggaantgggtttcaaaanaannntgncnnnaantttnngttttnnaaanattgnanaanngggnttcaaatttttttggntntttnnnnnnaaaaataannancnnannantccnnanantttaattttttggggggnaantnnnntttaananttannaaannnnnnnnnnnnnnnnnnnnntntttnnnaaannnnnnnncc

SEQ ID NO: 59 - DNA, 907 bp, Homo Sapiens
  misc_feature (671)..(671): n is a, c, g, or t
  misc_feature (710)..(710): n is a, c, g, or t
  misc_feature (717)..(717): n is a, c, g, or t
  misc_feature (743)..(743): n is a, c, g, or t
  misc_feature (806)..(806): n is a, c, g, or t
  misc_feature (808)..(808): n is a, c, g, or t
  misc_feature (811)..(811): n is a, c, g, or t
  misc_feature (827)..(827): n is a, c, g, or t
  misc_feature (829)..(829): n is a, c, g, or t
  misc_feature (839)..(839): n is a, c, g, or t
  misc_feature (842)..(842): n is a, c, g, or t
  misc_feature (863)..(863): n is a, c, g, or t
  misc_feature (889)..(889): n is a, c, g, or t
  misc_feature (900)..(900): n is a, c, g, or t
  misc_feature (904)..(904): n is a, c, g, or t
aattagagaaattactatgagaggatcgcatcaccatcaccatcacggatcctatttaggtgacactatagaatcgtcgacccacgcgtccgggccgagcacgagggggctgcgcgcagctccgggcagggaccccgtctgcaccgggtggcctgcaagattgccggggtaggcagggggaggagaacgctcacccgttccggtctggcgctcccttttctccacacccacacgcctcccgctccacgctggcggcgcagctgctcccgctgccacagccgccaccgccgccgaagctcgcgccgccgccgctgccgccttggctgagcgcggtcacgtgacgcgatccgcggggagcctgggggcgggcgagtgcgcgcgcgcgcgcgcggaggaaccgcggctcggaccgggactgggagctgagcggcactgggagggcgtttaaggggaggacccggcgagcgcgccctcggctggcgagcgcgcgcctggcgattagaacttgccgcgcggtcgggaaagggtggccggagtgaggggcggaggtggggacttgcgcctccgcacgcccctccctttcttccttcccctgagcgccttggcttgccgctgcccccgccccctccagcgcgccccttccctcctgccgcagcctgcgattggctganaggctctgacgtccgtgtttccatgacgtgttggtgcangaaggancggcgggggaagaaggggtggccagncgcgcggggaggtgactccgtcagtcacagctgctgtttcggcgcggggccgggccgctgccncnacntgtggaggcaggaaancnatgattgccncangaaaaatgcgggcgccccttnactggggccctccgaaccgccccggnccatgccctcnaggncca

SEQ ID NO: 60 - DNA, 1200 bp, Homo Sapiens
  misc_feature (791)..(791): n is a, c, g, or t
  misc_feature (806)..(806): n is a, c, g, or t
  misc_feature (833)..(833): n is a, c, g, or t
  misc_feature (857)..(857): n is a, c, g, or t
  misc_feature (864)..(864): n is a, c, g, or t
  misc_feature (867)..(867): n is a, c, g, or t
  misc_feature (869)..(869): n is a, c, g, or t
  misc_feature (874)..(874): n is a, c, g, or t
  misc_feature (876)..(876): n is a, c, g, or t
  misc_feature (879)..(879): n is a, c, g, or t
  misc_feature (885)..(885): n is a, c, g, or t
  misc_feature (891)..(891): n is a, c, g, or t
  misc_feature (905)..(905): n is a, c, g, or t
  misc_feature (914)..(914): n is a, c, g, or t
  misc_feature (923)..(923): n is a, c, g, or t
  misc_feature (926)..(926): n is a, c, g, or t
  misc_feature (928)..(928): n is a, c, g, or t
  misc_feature (931)..(931): n is a, c, g, or t
  misc_feature (941)..(941): n is a, c, g, or t
  misc_feature (943)..(943): n is a, c, g, or t
  misc_feature (946)..(946): n is a, c, g, or t
  misc_feature (948)..(948): n is a, c, g, or t
  misc_feature (951)..(951): n is a, c, g, or t
  misc_feature (953)..(953): n is a, c, g, or t
  misc_feature (969)..(969): n is a, c, g, or t
  misc_feature (971)..(971): n is a, c, g, or t
  misc_feature (975)..(975): n is a, c, g, or t
  misc_feature (978)..(978): n is a, c, g, or t
  misc_feature (980)..(980): n is a, c, g, or t
  misc_feature (988)..(988): n is a, c, g, or t
  misc_feature (992)..(992): n is a, c, g, or t
  misc_feature (1001)..(1001): n is a, c, g, or t
  misc_feature (1012)..(1013): n is a, c, g, or t
  misc_feature (1016)..(1016): n is a, c, g, or t
  misc_feature (1019)..(1019): n is a, c, g, or t
  misc_feature (1022)..(1022): n is a, c, g, or t
  misc_feature (1024)..(1025): n is a, c, g, or t
  misc_feature (1027)..(1027): n is a, c, g, or t
  misc_feature (1033)..(1033): n is a, c, g, or t
  misc_feature (1038)..(1038): n is a, c, g, or t
  misc_feature (1040)..(1042): n is a, c, g, or t
  misc_feature (1045)..(1045): n is a, c, g, or t
  misc_feature (1047)..(1047): n is a, c, g, or t
  misc_feature (1051)..(1051): n is a, c, g, or t
  misc_feature (1053)..(1053): n is a, c, g, or t
  misc_feature (1055)..(1055): n is a, c, g, or t
  misc_feature (1059)..(1059): n is a, c, g, or t
  misc_feature (1065)..(1065): n is a, c, g, or t
  misc_feature (1068)..(1068): n is a, c, g, or t
  misc_feature (1071)..(1071): n is a, c, g, or t
  misc_feature (1077)..(1083): n is a, c, g, or t
  misc_feature (1085)..(1085): n is a, c, g, or t
  misc_feature (1090)..(1091): n is a, c, g, or t
  misc_feature (1095)..(1095): n is a, c, g, or t
  misc_feature (1099)..(1099): n is a, c, g, or t
  misc_feature (1102)..(1103): n is a, c, g, or t
  misc_feature (1113)..(1114): n is a, c, g, or t
  misc_feature (1116)..(1116): n is a, c, g, or t
  misc_feature (1125)..(1125): n is a, c, g, or t
  misc_feature (1127)..(1128): n is a, c, g, or t
  misc_feature (1130)..(1130): n is a, c, g, or t
  misc_feature (1147)..(1147): n is a, c, g, or t
  misc_feature (1154)..(1154): n is a, c, g, or t
  misc_feature (1158)..(1159): n is a, c, g, or t
  misc_feature (1162)..(1162): n is a, c, g, or t
  misc_feature (1167)..(1167): n is a, c, g, or t
  misc_feature (1170)..(1172): n is a, c, g, or t
  misc_feature (1174)..(1174): n is a, c, g, or t
  misc_feature (1178)..(1178): n is a, c, g, or t
  misc_feature (1180)..(1181): n is a, c, g, or t
  misc_feature (1183)..(1184): n is a, c, g, or t
  misc_feature (1190)..(1190): n is a, c, g, or t
  misc_feature (1194)..(1195): n is a, c, g, or t
  misc_feature (1198)..(1198): n is a, c, g, or t
  misc_feature (1200)..(1200): n is a, c, g, or t
agagagaattactatgagaggatcgcatcaccatcaccatcacggatcctatttaggtgacactatagaatcgtcgacccacgcgtccgctggcacagatccgcgatgcccggggggcgctgagtgccctgcgcgaagagcaccgggagaagcttcgccgggcagccgaggaggcagagcgccagcgccagatccagctggcccagaagctggagataatgcggcagaagaagcaggagtacctggaggtgcagaggcagctggccatccagcgcctgcaggagcaggagaaggagcggcagatgcggctggagcagcagaagcagacggtccagatgcgcgcgcagatgcccgccttccccctgccctacgcccagctccaggccatgcccgcagccggaggtgtgctctaccagccctcgggaccagccagcttccccagcaccttcagccccgccggctcggtggagggctccccaatgcacggcgtgtacatgagccagccggcccctgccgctggcccctaccccagcatgcccagcactgcggctgatcccagcatggtgagtgcctacatgtacccagcaggggccactggggcgcaggcggccccccaggcccaggccggacccaccgccagccccgcttactcatcctaccagcctactcccacagcgggctaccagaacgtggcctcccaggccccacagagcctcccggccatctctcagcctccgcagtccagcaccatgggctacatggggagccagtcagtctccatgggctaccanccttacaacatgcanaatctcatgaccaccctcccaagccangatgcgtctctgccaccccagcancccttanatngnggggnancancccatntaccancaaatggcaccctntgggggttnccccccaanaananccncccgtggccnanaancncangnaaaggggccccccggnanaggnaancnaggcccantttnttttttttnaattgaaccannccntgnttnanntncggaantaaantnnnttnantttncntnaaancccttnttnttnaaatgnnnnnnncntgccnncctngtcnttnntggggggaanntnccttttttngnnantgaggggggggcttttnccccaancccnnttnctttnttnnnancttntnnanncccttnaatnnttntn

SEQ ID NO: 61 - DNA, 1192 bp, Homo Sapiens
  misc_feature (929)..(929): n is a, c, g, or t
  misc_feature (961)..(961): n is a, c, g, or t
  misc_feature (968)..(968): n is a, c, g, or t
  misc_feature (972)..(972): n is a, c, g, or t
  misc_feature (974)..(974): n is a, c, g, or t
  misc_feature (976)..(976): n is a, c, g, or t
  misc_feature (978)..(978): n is a, c, g, or t
  misc_feature (983)..(983): n is a, c, g, or t
  misc_feature (995)..(995): n is a, c, g, or t
  misc_feature (998)..(998): n is a, c, g, or t
  misc_feature (1032)..(1033): n is a, c, g, or t
  misc_feature (1035)..(1035): n is a, c, g, or t
  misc_feature (1038)..(1038): n is a, c, g, or t
  misc_feature (1041)..(1041): n is a, c, g, or t
  misc_feature (1047)..(1047): n is a, c, g, or t
  misc_feature (1049)..(1049): n is a, c, g, or t
  misc_feature (1052)..(1052): n is a, c, g, or t
  misc_feature (1067)..(1067): n is a, c, g, or t
  misc_feature (1075)..(1076): n is a, c, g, or t
  misc_feature (1080)..(1081): n is a, c, g, or t
  misc_feature (1083)..(1083): n is a, c, g, or t
  misc_feature (1085)..(1085): n is a, c, g, or t
  misc_feature (1092)..(1092): n is a, c, g, or t
  misc_feature (1095)..(1097): n is a, c, g, or t
  misc_feature (1099)..(1099): n is a, c, g, or t
  misc_feature (1104)..(1105): n is a, c, g, or t
  misc_feature (1109)..(1111): n is a, c, g, or t
  misc_feature (1113)..(1113): n is a, c, g, or t
  misc_feature (1116)..(1116): n is a, c, g, or t
  misc_feature (1118)..(1120): n is a, c, g, or t
  misc_feature (1122)..(1124): n is a, c, g, or t
  misc_feature (1126)..(1127): n is a, c, g, or t
  misc_feature (1130)..(1130): n is a, c, g, or t
  misc_feature (1133)..(1133): n is a, c, g, or t
  misc_feature (1139)..(1139): n is a, c, g, or t
  misc_feature (1145)..(1146): n is a, c, g, or t
  misc_feature (1148)..(1148): n is a, c, g, or t
  misc_feature (1151)..(1152): n is a, c, g, or t
  misc_feature (1156)..(1156): n is a, c, g, or t
  misc_feature (1159)..(1159): n is a, c, g, or t
  misc_feature (1161)..(1161): n is a, c, g, or t
  misc_feature (1167)..(1169): n is a, c, g, or t
  misc_feature (1174)..(1176): n is a, c, g, or t
  misc_feature (1179)..(1179): n is a, c, g, or t
  misc_feature (1181)..(1184): n is a, c, g, or t
  misc_feature (1187)..(1187): n is a, c, g, or t
  misc_feature (1192)..(1192): n is a, c, g, or t
tagagaaattactatgagaggatcgcatcaccatcaccattcacggatcctatttaggtgacactatagaatcgtcgacccacgcgtccggaacatgggtctgggaaaatcgctgtgatatcaggggtcggcaccaggaattattatagaaagatcggctacagattacaaggcccgtacatggtgaagatgctgaaataatggccacaccagtccactcttctgcagtatcctccctggcagaacacggagaatcaggatttcttaaatactcaacagagaggctgagcagagcaaatggggggcttcaccctcatcccgcagctgcagagactggaaactgccttcaaggccacggctggtcatctgctgaccacaccccagatccgccctctcctgcgtgcaccccaaaaaatcacttgcgtttttgaggcttaaatcatctatccagtttctacattttgcatgaggcctgcaggtggcctattttgactcagacggtgaaaaaagcaaattaactcatttggacaccataactcatgcaataaaactgattgtcattcgaggagcaaacttaagagtagtttatttatataccctggggacagaaagtcaggttgaaacaggaaaaccaccagactctaatctcagccctttaacgacatacgcattggagcgcaagttaggaaaatgagcttttgttttcatggaaatcattctgattacagtgctgatgtttagaaataaatagcagtgtgactgggaaagaggaattgcagttgtgggggtgtgagcctggcagcagccagccagcagcctctcccaggcggggagtctaccatccgagacggcgatgacaaagagcttcattccacattctttgttatctctacttcccaccctcttggcaactacagagcagtgggggncagcccccaagtgtggtccccaaaaagcgttnggctttnctgncngncnatccngacggggggaantcncaggtggggtgcccctaaatcaaaattgcttccnnanaanccnttactngnaanttttttttttttttnctgaaaanncccnntngntcccccnagnnngnagggnngggnnnantcncnnngnnncnnccnccnccgggnttaagnnanttnncccnccncncccccnnnaaaannnggnannnnggnccccn

SEQ ID NO: 62 - DNA, 767 bp, Homo Sapiens
  misc_feature (526)..(526): n is a, c, g, or t
  misc_feature (693)..(693): n is a, c, g, or t
  misc_feature (705)..(705): n is a, c, g, or t
  misc_feature (710)..(710): n is a, c, g, or t
  misc_feature (732)..(732): n is a, c, g, or t
  misc_feature (763)..(763): n is a, c, g, or t
catatagagagattaactatgagaggatcgcatcaccatcaccatcacggatcctatttaggtgacactatagaatcgtcgacccacgcgtccggagcggagagcggaccccagagagccctgagcagccccaccgccgccgccggcctagttaccatcacaccccgggaggagccgcagctgccgcagccggccccagtcaccatcaccgcaaccatgagcagcgaggccgagacccagcagccgcccgccgccccccccgccgcccccgccctcagcgccgccgacaccaagcccggcactacgggcagcggcgcagggagcggtggcccgggcggcctcacatcggcggcgcctgccggcggggacaagaaggtcatcgcaacgaaggttttgggaacagtaaaatggttcaatgtaaggaacggatatggtttcatcaacaggaatgacaccaaggaagatgtatttgtacaccagactgccataaagaagaataaccccaggaagtaccttcgcagtgtangagatggagagactgtggagtttgatgttgttgaaggagaaaagggtgcggaggcagcaaatgttacaggtcctggtggtgttccagttcaaggcagtaaatatgcagcataccgtaaccattatagacgctatccacgtcgtaggggtcctccacgcaattaccancaaaattaccanaatantgagagtggggaaaagaacganggatcggagagtgctcccgaaaggccaggcncaac

SEQ ID NO: 63 - DNA, 1323 bp, Homo Sapiens
  misc_feature (1)..(1): n is a, c, g, or t
  misc_feature (238)..(238): n is a, c, g, or t
  misc_feature (289)..(289): n is a, c, g, or t
  misc_feature (331)..(331): n is a, c, g, or t
  misc_feature (733)..(733): n is a, c, g, or t
  misc_feature (805)..(805): n is a, c, g, or t
  misc_feature (828)..(828): n is a, c, g, or t
  misc_feature (850)..(850): n is a, c, g, or t
  misc_feature (867)..(867): n is a, c, g, or t
  misc_feature (894)..(894): n is a, c, g, or t
  misc_feature (905)..(905): n is a, c, g, or t
  misc_feature (923)..(923): n is a, c, g, or t
  misc_feature (945)..(945): n is a, c, g, or t
  misc_feature (963)..(963): n is a, c, g, or t
  misc_feature (997)..(997): n is a, c, g, or t
  misc_feature (1009)..(1009): n is a, c, g, or t
  misc_feature (1028)..(1028): n is a, c, g, or t
  misc_feature (1030)..(1030): n is a, c, g, or t
  misc_feature (1036)..(1036): n is a, c, g, or t
  misc_feature (1064)..(1064): n is a, c, g, or t
  misc_feature (1086)..(1086): n is a, c, g, or t
  misc_feature (1094)..(1094): n is a, c, g, or t
  misc_feature (1098)..(1098): n is a, c, g, or t
  misc_feature (1100)..(1100): n is a, c, g, or t
  misc_feature (1105)..(1105): n is a, c, g, or t
  misc_feature (1114)..(1114): n is a, c, g, or t
  misc_feature (1130)..(1130): n is a, c, g, or t
  misc_feature (1137)..(1137): n is a, c, g, or t
  misc_feature (1160)..(1160): n is a, c, g, or t
  misc_feature (1168)..(1168): n is a, c, g, or t
  misc_feature (1172)..(1172): n is a, c, g, or t
  misc_feature (1182)..(1182): n is a, c, g, or t
  misc_feature (1185)..(1185): n is a, c, g, or t
  misc_feature (1187)..(1187): n is a, c, g, or t
  misc_feature (1192)..(1192): n is a, c, g, or t
  misc_feature (1195)..(1196): n is a, c, g, or t
  misc_feature (1211)..(1211): n is a, c, g, or t
  misc_feature (1213)..(1213): n is a, c, g, or t
  misc_feature (1232)..(1232): n is a, c, g, or t
  misc_feature (1238)..(1238): n is a, c, g, or t
  misc_feature (1240)..(1242): n is a, c, g, or t
  misc_feature (1244)..(1246): n is a, c, g, or t
  misc_feature (1248)..(1256): n is a, c, g, or t
  misc_feature (1260)..(1260): n is a, c, g, or t
  misc_feature (1271)..(1275): n is a, c, g, or t
  misc_feature (1279)..(1279): n is a, c, g, or t
  misc_feature (1281)..(1281): n is a, c, g, or t
  misc_feature (1284)..(1284): n is a, c, g, or t
  misc_feature (1287)..(1287): n is a, c, g, or t
  misc_feature (1292)..(1297): n is a, c, g, or t
  misc_feature (1299)..(1300): n is a, c, g, or t
  misc_feature (1303)..(1303): n is a, c, g, or t
  misc_feature (1306)..(1306): n is a, c, g, or t
  misc_feature (1311)..(1313): n is a, c, g, or t
  misc_feature (1320)..(1321): n is a, c, g, or t
naattagagaaattactatgagaggatcgcatcaccatcaccatcacggatcctatttaggtgacactatagaatcgtcgacccacgcgtccgctggctcaggcggcgggcggcggtatcgaccccgacgtgttcaaatgctcaagtccatgtgtgccgggcagaggctagcgagcgagccccaggaccctgcggccgtgtctctgcccacgtcgagcgtgcccgagacccgaggganagacaaaggcagcgctgccctcgggggagtattggccctggcggaacgcancaaccacgagggatccagccagaggatgccacgccagcccancgctaccaggctgcccaaggggggcgggcctgggaagagccctacgcagggcagcacctaggatggggcagagacttgtcacatctttgtccccagcaaaggctacatgttacctccttcagttgataataaacctttctgagatgcagagggtccaggcttgagtgacaacttgaggacaaggcggcgcctcaacaagatttcacacagcagctacgggggccagagaagcagcaccgcatggtgtggcaggagaaggaggacatgcacaagcaattggttgaagcttcagagacattgaaatcccaagccaaagaactgaaagatgcccatcagcagcaaaagctggccctgcaggagttcttggagctcaatgagctcatggcagagctctactcccanaagcagaaggtgtgggacaaggaggaggagatggaagtagccatgcagaaagctgacatgatgtggcagganatctgaagatccaagaagctcanaaagaggatgctgtttagccanatgcggtggctcacgcntgtaatcccagcacttttgggaggtcnaagcgggttgnatggcctgaggtcagganttttgaaaccagcctggccaanatggtgaaaccctgtttncttttaaaaatgccaaaatttacccaggcatggnattgggtggctntaatccaactacttgggangntgaaanaagaaaatttgctttaaccttggaaggnggaagtttcattgaaccaaaantatgcccnttgncncttcnaacctgggnaaaaaaaaaaaaaaanttttttncaaaaaaaaaaaaggggggggangaaacctntttnaaaattttcnccnangggtnttnncgggaattttttttnancctttaaaaaaaccttttnaaaaanannnannnannnnnnnnngggnggccccccccnnnnngggncnaanaanctttnnnnnntnnacntgnccccnnnaaaaaannaa

SEQ ID NO: 64 - DNA, 1316 bp, Homo Sapiens
  misc_feature (4)..(4): n is a, c, g, or t
  misc_feature (721)..(721): n is a, c, g, or t
  misc_feature (759)..(759): n is a, c, g, or t
  misc_feature (766)..(766): n is a, c, g, or t
  misc_feature (777)..(777): n is a, c, g, or t
  misc_feature (783)..(783): n is a, c, g, or t
  misc_feature (797)..(797): n is a, c, g, or t
  misc_feature (808)..(808): n is a, c, g, or t
  misc_feature (822)..(822): n is a, c, g, or t
  misc_feature (855)..(855): n is a, c, g, or t
  misc_feature (889)..(889): n is a, c, g, or t
  misc_feature (893)..(893): n is a, c, g, or t
  misc_feature (897)..(897): n is a, c, g, or t
  misc_feature (914)..(914): n is a, c, g, or t
  misc_feature (929)..(929): n is a, c, g, or t
  misc_feature (931)..(932): n is a, c, g, or t
  misc_feature (934)..(934): n is a, c, g, or t
  misc_feature (936)..(936): n is a, c, g, or t
  misc_feature (938)..(944): n is a, c, g, or t
  misc_feature (946)..(963): n is a, c, g, or t
  misc_feature (965)..(971): n is a, c, g, or t
  misc_feature (973)..(993): n is a, c, g, or t
  misc_feature (1000)..(1001): n is a, c, g, or t
  misc_feature (1003)..(1003): n is a, c, g, or t
  misc_feature (1005)..(1005): n is a, c, g, or t
  misc_feature (1013)..(1014): n is a, c, g, or t
  misc_feature (1018)..(1018): n is a, c, g, or t
  misc_feature (1020)..(1021): n is a, c, g, or t
  misc_feature (1023)..(1023): n is a, c, g, or t
  misc_feature (1028)..(1028): n is a, c, g, or t
  misc_feature (1030)..(1030): n is a, c, g, or t
  misc_feature (1034)..(1035): n is a, c, g, or t
  misc_feature (1040)..(1041): n is a, c, g, or t
  misc_feature (1044)..(1044): n is a, c, g, or t
  misc_feature (1047)..(1047): n is a, c, g, or t
  misc_feature (1052)..(1053): n is a, c, g, or t
  misc_feature (1056)..(1058): n is a, c, g, or t
  misc_feature (1065)..(1065): n is a, c, g, or t
  misc_feature (1068)..(1068): n is a, c, g, or t
  misc_feature (1070)..(1070): n is a, c, g, or t
  misc_feature (1072)..(1073): n is a, c, g, or t
  misc_feature (1079)..(1079): n is a, c, g, or t
  misc_feature (1083)..(1084): n is a, c, g, or t
  misc_feature (1090)..(1090): n is a, c, g, or t
  misc_feature (1097)..(1098): n is a, c, g, or t
  misc_feature (1114)..(1114): n is a, c, g, or t
  misc_feature (1117)..(1117): n is a, c, g, or t
  misc_feature (1122)..(1122): n is a, c, g, or t
  misc_feature (1127)..(1127): n is a, c, g, or t
  misc_feature (1132)..(1132): n is a, c, g, or t
  misc_feature (1145)..(1145): n is a, c, g, or t
  misc_feature (1147)..(1147): n is a, c, g, or t
  misc_feature (1155)..(1155): n is a, c, g, or t
  misc_feature (1157)..(1157): n is a, c, g, or t
  misc_feature (1160)..(1161): n is a, c, g, or t
  misc_feature (1165)..(1165): n is a, c, g, or t
  misc_feature (1170)..(1171): n is a, c, g, or t
  misc_feature (1179)..(1179): n is a, c, g, or t
  misc_feature (1183)..(1184): n is a, c, g, or t
  misc_feature (1188)..(1188): n is a, c, g, or t
  misc_feature (1191)..(1194): n is a, c, g, or t
  misc_feature (1198)..(1199): n is a, c, g, or t
  misc_feature (1213)..(1213): n is a, c, g, or t
  misc_feature (1216)..(1216): n is a, c, g, or t
  misc_feature (1221)..(1221): n is a, c, g, or t
  misc_feature (1223)..(1223): n is a, c, g, or t
  misc_feature (1226)..(1226): n is a, c, g, or t
  misc_feature (1236)..(1236): n is a, c, g, or t
  misc_feature (1238)..(1238): n is a, c, g, or t
  misc_feature (1243)..(1243): n is a, c, g, or t
  misc_feature (1246)..(1246): n is a, c, g, or t
  misc_feature (1248)..(1248): n is a, c, g, or t
  misc_feature (1251)..(1252): n is a, c, g, or t
  misc_feature (1254)..(1254): n is a, c, g, or t
  misc_feature (1256)..(1256): n is a, c, g, or t
  misc_feature (1273)..(1273): n is a, c, g, or t
  misc_feature (1279)..(1284): n is a, c, g, or t
  misc_feature (1286)..(1286): n is a, c, g, or t
  misc_feature (1288)..(1288): n is a, c, g, or t
  misc_feature (1290)..(1290): n is a, c, g, or t
  misc_feature (1292)..(1299): n is a, c, g, or t
  misc_feature (1305)..(1305): n is a, c, g, or t
  misc_feature (1309)..(1309): n is a, c, g, or t
  misc_feature (1316)..(1316): n is a, c, g, or t
attngagaaattactatgagaggatcgcatcaccatcaccatcacggatcctatttaggtgacactatagaatcgtcgacccacgcgtccgcccaggccccagcccagcaggacctgcaggggacgagccagccgagagcccatcggagaccccaggcccccgcccagcaggacctgcaggggacgagccagccgagagcccatcggagaccccaggcccccgcccggcaggacctgcaggggacgagccagccgagagcccatcggagaccccaggccccagcccggcaggacctacaagggatgagccagccgagagcccatcggagaccccaggcccccgcccggcaggacctgcaggggacgagccagccgagagcccatcggagaccccaggcccccgcccggcaggacctgcaggggacgagccagccgagagcccatcggagaccccaggccccagcccggcaggacctacaagggatgagccagccaaggcgggggaggcagcagagttgcaggacgcagaggtggagtcttctgccaagtctgggaagccttaaggaaaggagtgcccgtcggcgtcttggtcctcctgtccctgctgcaggggctggggcctccggagctgctgcgggctcccctcaggctctgcttcgtgacccgtgacccatgacccacagtgctggcctcctgtggggccactatagcagcccaccanaaagccgcgaggccctcagggaagcccaaggcctgcanaagcctncctggcctggntgtgtntttccccacccagnttttcccctgngccccttgtttttnttaattgaccctttttggaatgggggggcggcnggcaaggctgctttttctttattctgataccaancaanggcntttttttgaataaattntttttgactttttgnannananannnnnnnannnnnnnnnnnnnnnnnntnnnnnnntnnnnnnnnnnnnnnnnnnnnnggggggnncncntcccttanngggngnncntattnancttnnttttnnttnaanttggnntcnnntttttanaantncnntaatgncttnnaaaatncttttgnnttttttttaaaaaccnttnttttnccccnggggntttttttttttgngnaaaattcnanctnntttntgggnnattttttngggnntttnggnnnntttnnatgggaaaaaaaanttntgggntnttncccccctttntnttttnccngnggnntntnaaaaaattttttggggntttttnnnnnntntncnannnnnnnnaaaaanaaanttttttn

SEQ ID NO: 65 - DNA, 1415 bp, Homo Sapiens
  misc_feature (879)..(879): n is a, c, g, or t
  misc_feature (947)..(947): n is a, c, g, or t
  misc_feature (952)..(952): n is a, c, g, or t
  misc_feature (975)..(975): n is a, c, g, or t
  misc_feature (983)..(983): n is a, c, g, or t
  misc_feature (997)..(997): n is a, c, g, or t
  misc_feature (1009)..(1009): n is a, c, g, or t
  misc_feature (1014)..(1014): n is a, c, g, or t
  misc_feature (1017)..(1017): n is a, c, g, or t
  misc_feature (1020)..(1020): n is a, c, g, or t
  misc_feature (1061)..(1061): n is a, c, g, or t
  misc_feature (1064)..(1064): n is a, c, g, or t
  misc_feature (1069)..(1069): n is a, c, g, or t
  misc_feature (1072)..(1073): n is a, c, g, or t
  misc_feature (1078)..(1078): n is a, c, g, or t
  misc_feature (1086)..(1086): n is a, c, g, or t
  misc_feature (1088)..(1089): n is a, c, g, or t
  misc_feature (1095)..(1095): n is a, c, g, or t
  misc_feature (1097)..(1097): n is a, c, g, or t
  misc_feature (1107)..(1107): n is a, c, g, or t
  misc_feature (1126)..(1126): n is a, c, g, or t
  misc_feature (1138)..(1138): n is a, c, g, or t
  misc_feature (1142)..(1142): n is a, c, g, or t
  misc_feature (1158)..(1159): n is a, c, g, or t
  misc_feature (1162)..(1162): n is a, c, g, or t
  misc_feature (1173)..(1173): n is a, c, g, or t
  misc_feature (1175)..(1175): n is a, c, g, or t
  misc_feature (1179)..(1179): n is a, c, g, or t
  misc_feature (1184)..(1184): n is a, c, g, or t
  misc_feature (1217)..(1218): n is a, c, g, or t
  misc_feature (1224)..(1225): n is a, c, g, or t
  misc_feature (1227)..(1227): n is a, c, g, or t
  misc_feature (1234)..(1234): n is a, c, g, or t
  misc_feature (1236)..(1238): n is a, c, g, or t
  misc_feature (1240)..(1240): n is a, c, g, or t
  misc_feature (1246)..(1246): n is a, c, g, or t
  misc_feature (1264)..(1265): n is a, c, g, or t
  misc_feature (1278)..(1278): n is a, c, g, or t
  misc_feature (1281)..(1281): n is a, c, g, or t
  misc_feature (1283)..(1283): n is a, c, g, or t
  misc_feature (1291)..(1291): n is a, c, g, or t
  misc_feature (1293)..(1293): n is a, c, g, or t
  misc_feature (1296)..(1296): n is a, c, g, or t
  misc_feature (1312)..(1312): n is a, c, g, or t
  misc_feature (1318)..(1318): n is a, c, g, or t
  misc_feature (1322)..(1322): n is a, c, g, or t
  misc_feature (1329)..(1331): n is a, c, g, or t
  misc_feature (1336)..(1336): n is a, c, g, or t
  misc_feature (1340)..(1340): n is a, c, g, or t
  misc_feature (1345)..(1345): n is a, c, g, or t
  misc_feature (1355)..(1356): n is a, c, g, or t
  misc_feature (1364)..(1364): n is a, c, g, or t
  misc_feature (1366)..(1366): n is a, c, g, or t
  misc_feature (1378)..(1381): n is a, c, g, or t
  misc_feature (1383)..(1387): n is a, c, g, or t
  misc_feature (1394)..(1394): n is a, c, g, or t
  misc_feature (1404)..(1404): n is a, c, g, or t
  misc_feature (1412)..(1412): n is a, c, g, or t
  misc_feature (1415)..(1415): n is a, c, g, or t
atagagaaattactatgagaggatcgcatcaccatcaccatcacggatcctatttaggtgacactatagaatcgtcgacccacgcgtccgcaagctttcgaagacacatgatggcacacactggagatggccctcataaatgcacagtatgtgggaaagcctttgattctcctagtgtatttcaaagacatgaaaggactcacactggagagaaaccctatgaatgcaagcaatgtgggaaagccttccgtacttccagttcccttcgaaaacatgaaacaacacacactggagagcaaccctataaatgtaaatgtggaaaagcttttagtgatttattttcctttcaaagtcatgaaacaacacacagtgaagaggagccttatgaatgtaaggagtgtgggaaagcatttagttcttttaaatacttttgtcgccatgaaaggactcacagtgaagaaaaatcttatgagtgtcaaatttgtggcaaagccttcagtcgtttcagttacttaaaaactcatgaaaggactcacacggcagagaagccatatgaatgtaagcaatgcaggaaagcattcttttggccctctttccttctaagacatgaaaggactcacactggagaaagaccctatgaatgtaaacactgtggtaaagccttcagtcgttccagtttctgtcgagaacatgaaagaactcacactggagagaagccctatgaatgtaaggaatgtgggaaagccttcagttctctcagttcctttaatagacataaaaggacacactggaaggatattctataagtgtatggaatgtgggaaagcattcattggttttatcacattcagatacttgaaagaaataaatcctgtgaantgtaaacgtggtaaagccttaaaaagtttccaggctgggcgcagcggctcacacctgtaatcccagcnctttngagaggccgaggagggcagatcncgaggccnggaaatcgagaccngcctggctaacntgggnaanccngtccctctaaaaaatacggaaaaaaaaaaaatagcccggcntanttgcnccnnccggnagtcctancnncccggngnctgaggcggnaaatcccttgaacccgganggggaggttgcnggancccaaattgccctacnnccnccccctggggncnaagngaacnccctcccaaaaaaaaaaaaggggggcccccccnnggggcnnanaacctantnnngnctgggncccggggaaacccaaagnncccaacccctggnttntnaaacccgngnccngggtttttggggaacncccccngggnttcgggnnnggccnaggnaaaancggatccccnnatcccggncnaaaattgggttnnnntnnnnnaaccccnggattctttnaaaaaaanttn

SEQ ID NO: 66 - DNA, 1330 bp, Homo Sapiens
  misc_feature (1)..(1): n is a, c, g, or t
  misc_feature (802)..(802): n is a, c, g, or t
  misc_feature (860)..(860): n is a, c, g, or t
  misc_feature (863)..(863): n is a, c, g, or t
  misc_feature (872)..(872): n is a, c, g, or t
  misc_feature (895)..(895): n is a, c, g, or t
  misc_feature (906)..(906): n is a, c, g, or t
  misc_feature (910)..(915): n is a, c, g, or t
  misc_feature (917)..(930): n is a, c, g, or t
  misc_feature (949)..(949): n is a, c, g, or t
  misc_feature (951)..(952): n is a, c, g, or t
  misc_feature (959)..(959): n is a, c, g, or t
  misc_feature (971)..(971): n is a, c, g, or t
  misc_feature (974)..(974): n is a, c, g, or t
  misc_feature (978)..(978): n is a, c, g, or t
  misc_feature (1006)..(1006): n is a, c, g, or t
  misc_feature (1017)..(1017): n is a, c, g, or t
  misc_feature (1023)..(1023): n is a, c, g, or t
  misc_feature (1028)..(1028): n is a, c, g, or t
  misc_feature (1030)..(1030): n is a, c, g, or t
  misc_feature (1034)..(1034): n is a, c, g, or t
  misc_feature (1036)..(1036): n is a, c, g, or t
  misc_feature (1048)..(1049): n is a, c, g, or t
  misc_feature (1058)..(1058): n is a, c, g, or t
  misc_feature (1062)..(1062): n is a, c, g, or t
  misc_feature (1077)..(1077): n is a, c, g, or t
  misc_feature (1080)..(1081): n is a, c, g, or t
  misc_feature (1092)..(1092): n is a, c, g, or t
  misc_feature (1095)..(1095): n is a, c, g, or t
  misc_feature (1099)..(1099): n is a, c, g, or t
  misc_feature (1106)..(1106): n is a, c, g, or t
  misc_feature (1110)..(1110): n is a, c, g, or t
  misc_feature (1112)..(1112): n is a, c, g, or t
  misc_feature (1118)..(1118): n is a, c, g, or t
  misc_feature (1126)..(1126): n is a, c, g, or t
  misc_feature (1129)..(1129): n is a, c, g, or t
  misc_feature (1132)..(1132): n is a, c, g, or t
  misc_feature (1158)..(1158): n is a, c, g, or t
  misc_feature (1160)..(1160): n is a, c, g, or t
  misc_feature (1163)..(1163): n is a, c, g, or t
  misc_feature (1169)..(1169): n is a, c, g, or t
  misc_feature (1171)..(1171): n is a, c, g, or t
  misc_feature (1182)..(1182): n is a, c, g, or t
  misc_feature (1186)..(1186): n is a, c, g, or t
  misc_feature (1202)..(1202): n is a, c, g, or t
  misc_feature (1209)..(1211): n is a, c, g, or t
  misc_feature (1213)..(1213): n is a, c, g, or t
  misc_feature (1217)..(1218): n is a, c, g, or t
  misc_feature (1221)..(1221): n is a, c, g, or t
  misc_feature (1225)..(1225): n is a, c, g, or t
  misc_feature (1233)..(1233): n is a, c, g, or t
  misc_feature (1237)..(1238): n is a, c, g, or t
  misc_feature (1243)..(1243): n is a, c, g, or t
  misc_feature (1250)..(1254): n is a, c, g, or t
  misc_feature (1265)..(1266): n is a, c, g, or t
  misc_feature (1268)..(1268): n is a, c, g, or t
  misc_feature (1280)..(1280): n is a, c, g, or t
  misc_feature (1282)..(1282): n is a, c, g, or t
  misc_feature (1289)..(1289): n is a, c, g, or t
  misc_feature (1291)..(1292): n is a, c, g, or t
  misc_feature (1295)..(1296): n is a, c, g, or t
  misc_feature (1299)..(1300): n is a, c, g, or t
  misc_feature (1310)..(1310): n is a, c, g, or t
  misc_feature (1313)..(1313): n is a, c, g, or t
  misc_feature (1316)..(1319): n is a, c, g, or t
  misc_feature (1324)..(1324): n is a, c, g, or t
  misc_feature (1327)..(1327): n is a, c, g, or t
  misc_feature (1330)..(1330): n is a, c, g, or t
nattagagaaattactatgagaggatcgcatcaccatcaccatcacggatcctatttaggtgacactatagaatcgtcgacccacgcgtccgccccagccccagacacggaccccgcaggagatgggtgcccccatccgcacactgtcctttggccaccggacatcatgcctcccaagaaggatgttcccgtgaagaaaccagcagggccctccatctccaaacctgctgctaagccagcagcagcaggggctcctccagccaagaccaaagctgagccagctgtcccccaggcccctcagaaaacccaggagcctccagtcgatctctccaaagtggtgatcgagtttaacaaggaccagctggaggagttcaaggaggccttcgagctgtttgaccgagtgggggatggcaagatcctgtacagccagtgtggggacgtgatgagggccctgggccagaaccccaccaacgccgaggtgctcaaggtcctggggaaccccaagagtgatgagctgaagtcgcggcgtgtggactttgagactttcctgcccatgctccaggcagtggccaagaaccgaggccaaggcacatatgaggactacttggaggggtttcgtgtgtttgacaaggaggggaacggcaaagtcatgggagcagagctcagacatgttctcaccacccttggagagaagatgactgaggaggaggtggagaccgttctggcaggacacgaggacagcaacggctgcatcaactacgaggccttcttgaaacacatcctaagcgtctgagtgctgcanatccagtggggtccggacactgggccccgcaggcgaaagcacgttccagccaccaagnagnccacctatngtttcaaataaaaactgggttcntctcttaaaanaaannnnnnannnnnnnnnnnnnnggggcggccgcctccctananngagtcgnattaacttaatnacngaancttggaactcctgttgaaaaaatcccantaaatgaaccncaaaanttccntntggnanttttttcaaaanncttcggttntccnccgggggtttttttnttnnggggaaaatcnaanctanttttggngaantnttttcngaacttanggnacnttaaatggaaaaaaaaattccctggnantanccccgntnaaatattccangggntcaaaaaaaattttgnggttttnnncnttgnncanggtncctaaccnaacnntttcngggaaannnnncttttttaaanncnaaaaaaaaaccnantttttcngnnttnnttnntttttccccnganaannnnccccnaanttn

SEQ ID NO: 67 - DNA, 1412 bp, Homo Sapiens
  misc_feature (770)..(770): n is a, c, g, or t
  misc_feature (777)..(783): n is a, c, g, or t
  misc_feature (786)..(788): n is a, c, g, or t
  misc_feature (794)..(795): n is a, c, g, or t
  misc_feature (797)..(807): n is a, c, g, or t
  misc_feature (849)..(849): n is a, c, g, or t
  misc_feature (854)..(854): n is a, c, g, or t
  misc_feature (867)..(867): n is a, c, g, or t
  misc_feature (875)..(875): n is a, c, g, or t
  misc_feature (905)..(905): n is a, c, g, or t
  misc_feature (907)..(907): n is a, c, g, or t
  misc_feature (910)..(910): n is a, c, g, or t
  misc_feature (948)..(948): n is a, c, g, or t
  misc_feature (951)..(951): n is a, c, g, or t
  misc_feature (962)..(962): n is a, c, g, or t
  misc_feature (964)..(964): n is a, c, g, or t
  misc_feature (966)..(966): n is a, c, g, or t
  misc_feature (986)..(986): n is a, c, g, or t
  misc_feature (995)..(995): n is a, c, g, or t
  misc_feature (1016)..(1016): n is a, c, g, or t
  misc_feature (1021)..(1021): n is a, c, g, or t
  misc_feature (1033)..(1033): n is a, c, g, or t
  misc_feature (1037)..(1038): n is a, c, g, or t
  misc_feature (1042)..(1042): n is a, c, g, or t
  misc_feature (1044)..(1045): n is a, c, g, or t
  misc_feature (1047)..(1047): n is a, c, g, or t
  misc_feature (1051)..(1051): n is a, c, g, or t
  misc_feature (1067)..(1067): n is a, c, g, or t
  misc_feature (1071)..(1071): n is a, c, g, or t
  misc_feature (1076)..(1076): n is a, c, g, or t
  misc_feature (1086)..(1087): n is a, c, g, or t
  misc_feature (1092)..(1092): n is a, c, g, or t
  misc_feature (1097)..(1097): n is a, c, g, or t
  misc_feature (1101)..(1101): n is a, c, g, or t
  misc_feature (1107)..(1107): n is a, c, g, or t
  misc_feature (1119)..(1119): n is a, c, g, or t
  misc_feature (1149)..(1149): n is a, c, g, or t
  misc_feature (1151)..(1151): n is a, c, g, or t
  misc_feature (1159)..(1159): n is a, c, g, or t
  misc_feature (1162)..(1162): n is a, c, g, or t
  misc_feature (1167)..(1167): n is a, c, g, or t
  misc_feature (1181)..(1181): n is a, c, g, or t
  misc_feature (1195)..(1195): n is a, c, g, or t
  misc_feature (1203)..(1203): n is a, c, g, or t
  misc_feature (1208)..(1208): n is a, c, g, or t
  misc_feature (1211)..(1211): n is a, c, g, or t
  misc_feature (1223)..(1223): n is a, c, g, or t
  misc_feature (1229)..(1229): n is a, c, g, or t
  misc_feature (1235)..(1235): n is a, c, g, or t
  misc_feature (1239)..(1239): n is a, c, g, or t
  misc_feature (1243)..(1243): n is a, c, g, or t
  misc_feature (1247)..(1247): n is a, c, g, or t
  misc_feature (1259)..(1260): n is a, c, g, or t
  misc_feature (1277)..(1277): n is a, c, g, or t
  misc_feature (1287)..(1287): n is a, c, g, or t
  misc_feature (1292)..(1292): n is a, c, g, or t
  misc_feature (1306)..(1307): n is a, c, g, or t
  misc_feature (1309)..(1309): n is a, c, g, or t
  misc_feature (1313)..(1314): n is a, c, g, or t
  misc_feature (1331)..(1331): n is a, c, g, or t
  misc_feature (1333)..(1333): n is a, c, g, or t
  misc_feature (1339)..(1339): n is a, c, g, or t
  misc_feature (1341)..(1341): n is a, c, g, or t
  misc_feature (1343)..(1343): n is a, c, g, or t
  misc_feature (1348)..(1348): n is a, c, g, or t
  misc_feature (1369)..(1369): n is a, c, g, or t
  misc_feature (1376)..(1376): n is a, c, g, or t
  misc_feature (1378)..(1379): n is a, c, g, or t
  misc_feature (1385)..(1385): n is a, c, g, or t
  misc_feature (1390)..(1390): n is a, c, g, or t
  misc_feature (1405)..(1405): n is a, c, g, or t
tagagaaattactatgagaggatcgcatcaccatcaccatcacggatcctatttaggtgacactatagaatcgtcgacccacgcgtccgctggcacgggcgtggggactacctggccgtggtgctggccacccaaggccacacccaggtgctgattcaccagctgagccgtcgccgcagccagagtccgttccgccgcagccacggacaggtgcagcgagtggccttccaccctgcccggcccttcctgttggtggcgtcccagcgcagcgtccgcctctaccacctgctgcgccaggagctcaccaagaagctgatgcccaactgcaagtgggtgtccagcctggcggtgcaccctgcaggtgacaacgtcatctgtgggagctacgatagcaagctggtgtggtttgacctggatctttccaccaagccatacaggatgctgagacaccacaagaaggctctgcgggctgtggccttccacccgcggtacccactctttgcgtcaggctcggacgacggcagtgtcatcgtctgccatggcatggtgtacaatgaccttctgcagaaccccttgctggtgcccgtcaaggtgctgaagggacacgtgctgacccgagatctgggagtgctggacgtcatcttccaccccacccagccgtgggtcttctcctcgggggcagacgggactgtccgcctcttcacctagctgttctgcctgcctggggctggggtggtcgtgctgaagtcaacagagcctttaccctgtanaaaaaannnnnnnaannnaaaaannannnnnnnnnnngggcggccgctccctatagtgagtcgtattaagcttaattanctgancttggactcctgnttgaatanatccagtaatgacctcaaaactccatctgnanttnttcaaaaacgcttcggttgccgccgggcgttttttatnggngaaaatccaancnancttggcgaaattttcagganctaaggaancttaaatggaaaaaaaaatcntgganaaaccaccgttnaaanntccnanngnatcntaaaaaaattttgagnattnaatcnattgctcaannaactnaaacnaaancgttcncctgaaaattanggcctttttaaaaaccgtaaaaaaaaaaancnaagttttntcnggccntttttcaaattttngccccctgaaaaancccccccnaattntanggaaaaaaaaanggaaangggaantggnaaangttncccttttaaccnnttttaaaaaaaaaaaanttttttcctntgaanaaaaaaaaaatttnngntttnnaatttttaaaagggggntnggaaancncntttcnaaggtttaaaaatttttcccncccgggntnntttttnaaggnaaaaatttccccctnaaaaaaa

SEQ ID NO: 68 - DNA, 464 bp, Homo Sapiens
attaaactatgagaggatcgcatcaccatcaccatcacggatcctatttaggtgacactatagaatcgtcgacccacgcgtccgcccacgcgtccgggaacaatgaaataagcgagaagatccctcttctcccccctctctctcttgccccctccccccctcccctcccctctccccttgactcctctccgaggcaccatgctgacccgcctgttcagcgagcccggccttctctcggacgtgcccaagttcgccagctggggcgacggcgaagacgacgagccgaggagcgacaagggcgacgcgccgccaccgccaccgcctgcgcccgggccaggggctccggggccagcccgggcggccaagccagtccctctccgtggagaagaggggacggaggccacgttggccgaggtcaaggaggaaggcgagctggggggagaggaggaggaggaagaggagga

SEQ ID NO: 69 - DNA, 1031 bp, Homo Sapiens
ttactatgagaggatcgcatcaccatcaccatcacggatcctatttaggtgacactatagaatcgtcgacccacgcgtccgcgctgtgcgcggcggacgtcggaggcagcggggagcggagcggggccgccggggcctctccagggccgcagcggcagcagttgggccccccgccccggccggcggaccgaagaacgcaggaagggggccggggggacccgcccccggccggccgcagccatgaactccaacgtggagaacctacccccgcacatcatccgcctggtgtacaaggaggtgacgacactgaccgcagacccacccgatggcatcaaggtctttcccaacgaggaggacctcaccgacctccaggtcaccatcgagggccctgaggggaccccatatgctggaggtctgttccgcatgaaactcctgctggggaaggacttccctgcctccccacccaagggctacttcctgaccaagatcttccacccgaacgtgggcgccaatggcgagatctgcgtcaacgtgctcaagagggactggacggctgagctgggcatccgacacgtactgctgaccatcaagtgcctgctgatccaccctaaccccgagtctgcactcaacgaggaggcgggccgcctgctcttggagaactacgaggagtatgcagctcgggcccgtctgctcacagagatccacgggggcgccggcgggcccagcggcagggccgaagccggtcgggccctggccagtggcactgaagcttcctccaccgaccctggggccccagggggcccgggaggggctgagggtcccatggccaagaagcatgctggcgagcgcgataagaagctggcggccaagaaaaagacggacaagaagcgggcgctgcggcggctgtagtgggctctcttcctccttccaccgtgaccccaacctctcctgtcccctccctccaactctgtctctaagttatttaaattatggctggggtcggggagggtacagggggcactgggacctgg

SEQ ID NO: 70 - DNA, 1325 bp, Homo Sapiens
  misc_feature (807)..(807): n is a, c, g, or t
  misc_feature (834)..(834): n is a, c, g, or t
  misc_feature (905)..(905): n is a, c, g, or t
  misc_feature (932)..(932): n is a, c, g, or t
  misc_feature (937)..(937): n is a, c, g, or t
  misc_feature (952)..(952): n is a, c, g, or t
  misc_feature (974)..(1015): n is a, c, g, or t
  misc_feature (1018)..(1021): n is a, c, g, or t
  misc_feature (1026)..(1026): n is a, c, g, or t
  misc_feature (1031)..(1031): n is a, c, g, or t
  misc_feature (1033)..(1033): n is a, c, g, or t
  misc_feature (1037)..(1037): n is a, c, g, or t
  misc_feature (1040)..(1040): n is a, c, g, or t
  misc_feature (1043)..(1043): n is a, c, g, or t
  misc_feature (1050)..(1050): n is a, c, g, or t
  misc_feature (1052)..(1052): n is a, c, g, or t
  misc_feature (1054)..(1054): n is a, c, g, or t
  misc_feature (1056)..(1056): n is a, c, g, or t
  misc_feature (1062)..(1063): n is a, c, g, or t
  misc_feature (1074)..(1074): n is a, c, g, or t
  misc_feature (1076)..(1077): n is a, c, g, or t
  misc_feature (1082)..(1082): n is a, c, g, or t
  misc_feature (1087)..(1088): n is a, c, g, or t
  misc_feature (1091)..(1091): n is a, c, g, or t
  misc_feature (1093)..(1093): n is a, c, g, or t
  misc_feature (1096)..(1096): n is a, c, g, or t
  misc_feature (1102)..(1102): n is a, c, g, or t
  misc_feature (1107)..(1110): n is a, c, g, or t
  misc_feature (1114)..(1114): n is a, c, g, or t
  misc_feature (1130)..(1130): n is a, c, g, or t
  misc_feature (1132)..(1132): n is a, c, g, or t
  misc_feature (1135)..(1135): n is a, c, g, or t
  misc_feature (1141)..(1141): n is a, c, g, or t
  misc_feature (1145)..(1146): n is a, c, g, or t
  misc_feature (1159)..(1159): n is a, c, g, or t
  misc_feature (1167)..(1168): n is a, c, g, or t
  misc_feature (1170)..(1174): n is a, c, g, or t
  misc_feature (1177)..(1177): n is a, c, g, or t
  misc_feature (1180)..(1180): n is a, c, g, or t
  misc_feature (1192)..(1194): n is a, c, g, or t
  misc_feature (1196)..(1196): n is a, c, g, or t
  misc_feature (1201)..(1201): n is a, c, g, or t
  misc_feature (1203)..(1203): n is a, c, g, or t
  misc_feature (1206)..(1207): n is a, c, g, or t
  misc_feature (1218)..(1219): n is a, c, g, or t
  misc_feature (1222)..(1222): n is a, c, g, or t
  misc_feature (1226)..(1228): n is a, c, g, or t
  misc_feature (1233)..(1236): n is a, c, g, or t
  misc_feature (1241)..(1241): n is a, c, g, or t
  misc_feature (1244)..(1245): n is a, c, g, or t
  misc_feature (1261)..(1261): n is a, c, g, or t
  misc_feature (1265)..(1266): n is a, c, g, or t
  misc_feature (1269)..(1275): n is a, c, g, or t
  misc_feature (1277)..(1277): n is a, c, g, or t
  misc_feature (1280)..(1281): n is a, c, g, or t
  misc_feature (1283)..(1284): n is a, c, g, or t
  misc_feature (1286)..(1286): n is a, c, g, or t
  misc_feature (1290)..(1292): n is a, c, g, or t
  misc_feature (1295)..(1297): n is a, c, g, or t
  misc_feature (1299)..(1300): n is a, c, g, or t
  misc_feature (1303)..(1305): n is a, c, g, or t
  misc_feature (1308)..(1308): n is a, c, g, or t
  misc_feature (1310)..(1310): n is a, c, g, or t
  misc_feature (1314)..(1314): n is a, c, g, or t
  misc_feature (1319)..(1319): n is a, c, g, or t
aatagagaaattactatgagaggatcgcatcaccatcaccatcacggatcctatttaggtgacactatagaatcgtcgacccacgcgtccgccaagatggcggatgaagccacgcgacgtgttgtgtctgagatcccggtgctgaagactaacgccggaccccgagatcgtgagttgtgggtgcagcgactgaaggaggaatatcagtcccttatccggtatgtggagaacaacaagaatgctgacaacgattggttccgactggagtccaacaaggaaggaactcggtggtttggaaaatgctggtatatccatgacctcctgaaatatgagtttgacatcgagtttgacattcctatcacatatcctactactgccccagaaattgcagttcctgagctggatggaaagacagcaaagatgtacaggggtggcaaaatatgcctgacggatcatttcaaacctttgtgggccaggaatgtgcccaaatttggactagctcatctcatggctctggggctgggtccatggctggcagtggaaatccctgatctgattcagaagggcgtcatccaacacaaagagaaatgcaaccaatgaagaatcaagccactgaggcagggcagagggacctttgataggctacgatactattttcctgtgcatcacacttaactcatctaactgcttccccggacaccctccacctctagttgttactaagtagctgcagtaggcattgctggggaagaaacaaacacacaccaaacagtactgctacttagtttctaaggctgcacagggaanggaaagactgggctttggacaatctanaggtaatttatatccgcccccaggtggagcaacatgcgattctggaggcacggggggtaactgaaagtgantacatatagtctttctggtttctgganaaaancccatcaataaaaanctgcttcctctggtaaaaaaannnnnnnnnnnnnnnnnnnnnnnnnnnnnnnnnnnnnnnnnnggnnnnccccnccctnangggnccnaanaaacctnantnanctgaannttgaaccccgntnnaaaantcccnnaangnccnccaaanccccnnnngganttttttcaaaaccctngnttncccccngggnntttttttttgggnaaaacccnncnnnnnttnggnaaattttcgggnnnanggaancnaannggaaaaaaaannccnggannnccccnnnnaaatnccnnggcccaaaaaaatttngggnnttnnnnnnntnccnngnncnaaannnacnnncnnggnnnacncntttnaaacnaaaaaa

SEQ ID NO: 71 - DNA, 1409 bp, Homo Sapiens
  misc_feature (850)..(850): n is a, c, g, or t
  misc_feature (852)..(919): n is a, c, g, or t
  misc_feature (924)..(924): n is a, c, g, or t
  misc_feature (932)..(932): n is a, c, g, or t
  misc_feature (935)..(935): n is a, c, g, or t
  misc_feature (938)..(939): n is a, c, g, or t
  misc_feature (943)..(943): n is a, c, g, or t
  misc_feature (951)..(951): n is a, c, g, or t
  misc_feature (958)..(958): n is a, c, g, or t
  misc_feature (961)..(961): n is a, c, g, or t
  misc_feature (965)..(965): n is a, c, g, or t
  misc_feature (969)..(969): n is a, c, g, or t
  misc_feature (989)..(989): n is a, c, g, or t
  misc_feature (998)..(1000): n is a, c, g, or t
  misc_feature (1011)..(1011): n is a, c, g, or t
  misc_feature (1017)..(1017): n is a, c, g, or t
  misc_feature (1031)..(1032): n is a, c, g, or t
  misc_feature (1037)..(1037): n is a, c, g, or t
  misc_feature (1041)..(1042): n is a, c, g, or t
  misc_feature (1049)..(1049): n is a, c, g, or t
  misc_feature (1052)..(1052): n is a, c, g, or t
  misc_feature (1057)..(1057): n is a, c, g, or t
  misc_feature (1066)..(1066): n is a, c, g, or t
  misc_feature (1075)..(1075): n is a, c, g, or t
  misc_feature (1078)..(1078): n is a, c, g, or t
  misc_feature (1081)..(1082): n is a, c, g, or t
  misc_feature (1085)..(1085): n is a, c, g, or t
  misc_feature (1088)..(1088): n is a, c, g, or t
  misc_feature (1093)..(1093): n is a, c, g, or t
  misc_feature (1096)..(1096): n is a, c, g, or t
  misc_feature (1101)..(1101): n is a, c, g, or t
  misc_feature (1104)..(1106): n is a, c, g, or t
  misc_feature (1113)..(1114): n is a, c, g, or t
  misc_feature (1119)..(1119): n is a, c, g, or t
  misc_feature (1133)..(1133): n is a, c, g, or t
  misc_feature (1147)..(1147): n is a, c, g, or t
  misc_feature (1160)..(1161): n is a, c, g, or t
  misc_feature (1164)..(1165): n is a, c, g, or t
  misc_feature (1168)..(1168): n is a, c, g, or t
  misc_feature (1184)..(1184): n is a, c, g, or t
  misc_feature (1188)..(1191): n is a, c, g, or t
  misc_feature (1193)..(1194): n is a, c, g, or t
  misc_feature (1197)..(1197): n is a, c, g, or t
  misc_feature (1199)..(1200): n is a, c, g, or t
  misc_feature (1203)..(1203): n is a, c, g, or t
  misc_feature (1205)..(1206): n is a, c, g, or t
  misc_feature (1211)..(1212): n is a, c, g, or t
  misc_feature (1217)..(1217): n is a, c, g, or t
  misc_feature (1220)..(1221): n is a, c, g, or t
  misc_feature (1223)..(1223): n is a, c, g, or t
  misc_feature (1228)..(1228): n is a, c, g, or t
  misc_feature (1230)..(1230): n is a, c, g, or t
  misc_feature (1232)..(1232): n is a, c, g, or t
  misc_feature (1245)..(1247): n is a, c, g, or t
  misc_feature (1257)..(1257): n is a, c, g, or t
  misc_feature (1259)..(1261): n is a, c, g, or t
  misc_feature (1267)..(1267): n is a, c, g, or t
  misc_feature (1269)..(1269): n is a, c, g, or t
  misc_feature (1271)..(1271): n is a, c, g, or t
  misc_feature (1276)..(1276): n is a, c, g, or t
  misc_feature (1278)..(1278): n is a, c, g, or t
  misc_feature (1284)..(1285): n is a, c, g, or t
  misc_feature (1289)..(1289): n is a, c, g, or t
  misc_feature (1295)..(1296): n is a, c, g, or t
  misc_feature (1301)..(1301): n is a, c, g, or t
  misc_feature (1304)..(1304): n is a, c, g, or t
  misc_feature (1309)..(1309): n is a, c, g, or t
  misc_feature (1319)..(1319): n is a, c, g, or t
  misc_feature (1321)..(1322): n is a, c, g, or t
  misc_feature (1325)..(1325): n is a, c, g, or t
  misc_feature (1328)..(1329): n is a, c, g, or t
  misc_feature (1334)..(1334): n is a, c, g, or t
  misc_feature (1337)..(1337): n is a, c, g, or t
  misc_feature (1342)..(1343): n is a, c, g, or t
  misc_feature (1347)..(1348): n is a, c, g, or t
  misc_feature (1363)..(1363): n is a, c, g, or t
  misc_feature (1377)..(1378): n is a, c, g, or t
  misc_feature (1383)..(1383): n is a, c, g, or t
  misc_feature (1389)..(1390): n is a, c, g, or t
  misc_feature (1398)..(1399): n is a, c, g, or t
  misc_feature (1401)..(1401): n is a, c, g, or t
  misc_feature (1404)..(1404): n is a, c, g, or t
  misc_feature (1406)..(1407): n is a, c, g, or t
  misc_feature (1409)..(1409): n is a, c, g, or t
tagagaaattactatgagaggatcgcatcaccatcaccatcacggatcctatttaggtgacactatagaatcgtcgacccacgcgtccgctagccgtcgcttacctaggatgccgcgtggaagccgaagccgcacctcccgcatggcccctccggccagccgggcccctcagatgagagctgcacccaggccagcaccagtcgctcagccactagcagcggcacccccatctgcagttggctcttctgctgctgcgccccggcagccaggtctgatggcccagatggcaaccactgcagctggcgtggctgtgggctctgctgtggggcacacattgggtcacgccattactgggggcttcagtggaggaagtaatgctgagcctgcgaggcctgacatcacttaccaggagcctcagggaacccagccagcacagcagcagcagccttgcctctatgagatcaaacagtttctggagtgtgcccagaaccagggtgacatcaagctctgtgagggtttcaatgaggtgctgaaacagtgccgacttgcaaacggattggcctaatgaagaagttcaacctggagagatggaaaatcagctctcataactaagttaatttagtataaaaatagaattgatagtgagggtataaagtgtaaccatcagttaaacctctcctgtcattcctggcttccttgcttcagaattgaaatggaagtgggggtgtccctactctgtagaatctgggactgggcaaatgtttgtgtggcctccttaaactagctgttatgttatgattttattctttgtgagttaattagaataaagtcattttcttccaaaaaaaanannnnnnnnnnnnnnnnnnnnnnnnnnnnnnnnnnnnnnnnnnnnnnnnnnnnnnnnnnnnnnnnnnnnaaaangggggccnccnccnnaaangggggccnaataaanctnaatntacntaaacttggaactctggttnaaaaatccnnnaaagaaccccnaaaatnctttggattttttnnaaaancctnngtttccnccnggggnttttttttnggggaaaanccnaannttnttnggggnaanttttnggnnntaggaannttaangggaaaaaaattcnggggaataaccccnttaaaatttcccnnggnntcnaaaaaaattttggggntttnnnncnnttntnnagnannaaaannaaaanttnngnggatntncncctttttaaaacnnnaaaaaaaaancnnntttttncngnctttntntttttnncccngaaaannccccnaantttangaaaaaaaanannggnaannaaatnccntttanntttnnaaaaaaaattttttngggaaaaaaaaatnngtttnaaattnnaaaggggnngnaancnntn

SEQ ID NO: 72 - DNA, 1335 bp, Homo Sapiens
  misc_feature (940)..(940): n is a, c, g, or t
  misc_feature (946)..(946): n is a, c, g, or t
  misc_feature (949)..(949): n is a, c, g, or t
  misc_feature (966)..(966): n is a, c, g, or t
  misc_feature (994)..(994): n is a, c, g, or t
  misc_feature (1041)..(1041): n is a, c, g, or t
  misc_feature (1044)..(1044): n is a, c, g, or t
  misc_feature (1060)..(1060): n is a, c, g, or t
  misc_feature (1071)..(1071): n is a, c, g, or t
  misc_feature (1088)..(1088): n is a, c, g, or t
  misc_feature (1108)..(1108): n is a, c, g, or t
  misc_feature (1112)..(1112): n is a, c, g, or t
  misc_feature (1120)..(1120): n is a, c, g, or t
  misc_feature (1124)..(1124): n is a, c, g, or t
  misc_feature (1139)..(1139): n is a, c, g, or t
  misc_feature (1147)..(1147): n is a, c, g, or t
  misc_feature (1155)..(1156): n is a, c, g, or t
  misc_feature (1163)..(1163): n is a, c, g, or t
  misc_feature (1172)..(1172): n is a, c, g, or t
  misc_feature (1178)..(1179): n is a, c, g, or t
  misc_feature (1182)..(1182): n is a, c, g, or t
  misc_feature (1188)..(1188): n is a, c, g, or t
  misc_feature (1190)..(1190): n is a, c, g, or t
  misc_feature (1197)..(1197): n is a, c, g, or t
  misc_feature (1200)..(1200): n is a, c, g, or t
  misc_feature (1202)..(1202): n is a, c, g, or t
  misc_feature (1217)..(1217): n is a, c, g, or t
  misc_feature (1225)..(1225): n is a, c, g, or t
  misc_feature (1227)..(1227): n is a, c, g, or t
  misc_feature (1237)..(1237): n is a, c, g, or t
  misc_feature (1242)..(1242): n is a, c, g, or t
  misc_feature (1245)..(1245): n is a, c, g, or t
  misc_feature (1256)..(1257): n is a, c, g, or t
  misc_feature (1260)..(1261): n is a, c, g, or t
  misc_feature (1263)..(1263): n is a, c, g, or t
  misc_feature (1270)..(1270): n is a, c, g, or t
  misc_feature (1273)..(1273): n is a, c, g, or t
  misc_feature (1275)..(1275): n is a, c, g, or t
  misc_feature (1279)..(1281): n is a, c, g, or t
  misc_feature (1285)..(1286): n is a, c, g, or t
  misc_feature (1296)..(1297): n is a, c, g, or t
  misc_feature (1301)..(1302): n is a, c, g, or t
  misc_feature (1307)..(1307): n is a, c, g, or t
  misc_feature (1309)..(1310): n is a, c, g, or t
  misc_feature (1314)..(1314): n is a, c, g, or t
  misc_feature (1326)..(1326): n is a, c, g, or t
  misc_feature (1329)..(1329): n is a, c, g, or t
  misc_feature (1331)..(1334): n is a, c, g, or t
tagagaaattactatgagaggatcgcatcaccatcaccatcacggatcctatttaggtgacactatagaatcgtcgacccacgcgtccggaaacttttcaacttggagcctgccattcagcgttgaggtagatgagttccgacactgtcacggctgtgttcccagcagcgaaggcctctgcggagctgccagtcgtcttgaacgtgcatgggcggcgtgtgacatctccagggaggccgtccgaagtcgagaatcgtcagctgtaagtaggagctacacagcgcagagaaaatggaaccacccatccgtgaggcctctttccggagggagccgcacacttggacttgagagtttgccagcagcgagctcggatgcatctctccaaaagccaccaaggtcggcgcgtctgaagagcgttttgcggtcatcagacttcctcatctgaaaacacagaacatactgaccctttcaagtacttagtcattttcctgaaagtgtggtctgtttcagaatgctgtggcaaccaggtaggtgtggcactggccatgtgccacgtctttgccctttgtagtctgtcagatattaaagtttctaaccctgtttttttaatctccaagaatggggaaagtggaatgtagagatggaagcagaacgtgatgtttggatacaacagctatttaatccttttttattttttaagcaaaacactcagttttctaccttattttctaatgttgatttcatggtaatactgacagttgggagtgtttaacataaaaactcattgctaaagagcactgaggaaatgggagctagcgcacttgtaataaaaataaagacaaaatattttcttgaatgcatatatgtgattgggtattttaaaaaccagtatcatctgtcatctccaaagattacaggagtcagcttgttaatacagtantgttantangttctgtatttttaatncagtacttaaaattctaggtcctttatngcccaaagtcacccagttagtttaaaccacaaactctgtcttggggncanataatgggggcggggnaatgacttgcntaaaatcccccacctgnaaaaaagctgaacgggcttnagcnttgcaaanggancgggttgcccccctngccccggnatttctgnnccctccngctccaggnttattnngcntgcccntnaaaccanganangaggcctcaggtggnaaaaaccntncctgttatcnaggtnccnaaaaaacctgnnacnnanggggggnccntncccnnngggnntcaaaaaaanngggnnaaaancnntttnaaaaattttaanccngnnnna

SEQ ID NO: 73 - DNA, 1200 bp, Homo Sapiens
  misc_feature (825)..(825): n is a, c, g, or t
  misc_feature (915)..(915): n is a, c, g, or t
  misc_feature (921)..(921): n is a, c, g, or t
  misc_feature (958)..(958): n is a, c, g, or t
  misc_feature (964)..(964): n is a, c, g, or t
  misc_feature (967)..(967): n is a, c, g, or t
  misc_feature (976)..(976): n is a, c, g, or t
  misc_feature (978)..(978): n is a, c, g, or t
  misc_feature (983)..(983): n is a, c, g, or t
  misc_feature (993)..(993): n is a, c, g, or t
  misc_feature (999)..(999): n is a, c, g, or t
  misc_feature (1002)..(1002): n is a, c, g, or t
  misc_feature (1008)..(1008): n is a, c, g, or t
  misc_feature (1016)..(1016): n is a, c, g, or t
  misc_feature (1022)..(1022): n is a, c, g, or t
  misc_feature (1025)..(1025): n is a, c, g, or t
  misc_feature (1043)..(1043): n is a, c, g, or t
  misc_feature (1054)..(1054): n is a, c, g, or t
  misc_feature (1064)..(1064): n is a, c, g, or t
  misc_feature (1068)..(1068): n is a, c, g, or t
  misc_feature (1070)..(1070): n is a, c, g, or t
  misc_feature (1075)..(1075): n is a, c, g, or t
  misc_feature (1080)..(1081): n is a, c, g, or t
  misc_feature (1086)..(1086): n is a, c, g, or t
  misc_feature (1091)..(1091): n is a, c, g, or t
  misc_feature (1099)..(1099): n is a, c, g, or t
  misc_feature (1101)..(1102): n is a, c, g, or t
  misc_feature (1109)..(1109): n is a, c, g, or t
  misc_feature (1115)..(1115): n is a, c, g, or t
  misc_feature (1118)..(1118): n is a, c, g, or t
  misc_feature (1121)..(1121): n is a, c, g, or t
  misc_feature (1138)..(1138): n is a, c, g, or t
  misc_feature (1141)..(1141): n is a, c, g, or t
  misc_feature (1145)..(1146): n is a, c, g, or t
  misc_feature (1148)..(1148): n is a, c, g, or t
  misc_feature (1151)..(1152): n is a, c, g, or t
  misc_feature (1154)..(1154): n is a, c, g, or t
  misc_feature (1157)..(1157): n is a, c, g, or t
  misc_feature (1162)..(1162): n is a, c, g, or t
  misc_feature (1165)..(1166): n is a, c, g, or t
  misc_feature (1168)..(1168): n is a, c, g, or t
  misc_feature (1170)..(1170): n is a, c, g, or t
  misc_feature (1174)..(1176): n is a, c, g, or t
  misc_feature (1179)..(1179): n is a, c, g, or t
  misc_feature (1181)..(1181): n is a, c, g, or t
  misc_feature (1184)..(1184): n is a, c, g, or t
  misc_feature (1188)..(1188): n is a, c, g, or t
  misc_feature (1191)..(1191): n is a, c, g, or t
  misc_feature (1198)..(1198): n is a, c, g, or t
gagaaattactatgagaggatcgcatcaccatcaccatcacggatcctatttaggtgacactatagaatcgtcgacccacgcgtccggcgtcgctccgggagctgccgacggacggagcgcccccgcccccgcccggccgcccgcccgccgccgccatgcccttctccaacagccacaacgcactgaagctgcgcttcccggccgaggacgagttccccgacctgagcgcccacaacaaccacatggccaaggtgctgacccccgagctgtacgcggagctgcgcgccaagagcacgccgagcggcttcacgctggacgacgtcatccagacaggcgtggacaacccgggccacccgtacatcatgaccgtgggctgcgtggcgggcgacgaggagtcctacgaagtgttcaaggatctcttcgaccccatcatcgaggaccggcacggcggctacaagcccagcgatgagcacaagaccgacctcaaccccgacaacctgcagggcggcgacgacctggaccccaactacgtgctgagctcgcgggtgcgcacgggccgcagcatccgtggcttctgcctccccccgcactgcagccgcggggagcgccgagccatcgagaagctcgcggtggaagccctgtccagcctggacggcgacctggcgggccgatactacgcgctcaagagcatgacggaggcggagcagcagcagctcatcgacgaccacttcctcttcgacaagcccgtgtcgcccctgctgctggcctcgggcatggcccgcgactggcccgacgcccgcggtatctggcacaatgacaataanaccttcctggtgtgggtcaacgaggaggaccacctgcgggtcatctccatgcaaaaggggggcaacatgaaggaggtgttcacccgcttntgcacnggcctcaccaaattgaaactctcttcagtctaaggantatganttnatgtggaancntcacntgggtaaatnctcacntgnccatcnaactgggnacgggntgnggcagtgtgcatataagntgccaactggnaacatgaaantttngnagtgnttaannggtgnaattnaaaaacangnnaaggggngtgaancgntgngggggggggtttttaanttncaanntnaanncnggnttttnaanngnantggnnnaangnggngaanaanaaatttntt

SEQ ID NO: 74 - DNA, 745 bp, Homo Sapiens
atgagaggatcgcatcaccatcaccatcacggatcctatttaggtgacactatagaatcgtcgacccacgcgtccggggaggagggtgcggcggcggcgcggcgtggccttccgcggaagggaagagtcccgcagtcggaggcggccggctgggcgtgcgctcgctccccgaagccggggctgggccggagccgggcgagggctgggagctgggccgggtccggggacagcgggcgaggggcagctgccggagccgggcagccaggccgctcagggcaggggacagctggcgccggttctgcggtctccggggcccagatgtgaggcggcggcgcccccggcccgagagcgcacgatgggggccccgctcgccgtagcgctgggcgccctccactacctggcacttttcctgcaactcggcggcgccacgcggcccgccggccacgcgccctgggacaaccacgtctccggccacgccctgttcacagagacaccccatgacatgacagcacggacgggcgaggacgtggagatggcctgctccttccgcggcagcggctccccctcctactcgctggagatccagtggtggtatgtacggagccaccgggactggaccgacaagcaggcgtgggcctcgaaccagctaaaagcatctcagcaggaagacgcagggaaggaggcaaccaaaataagtgtggtcaaggtggtgggcagcaacatctcccacaagctgcgcctgtcc

SEQ ID NO: 75 - DNA, 964 bp, Homo Sapiens
atggacaactacagcacaggctacgacgtcaagccaccttgcttgtaccaaatgcccctgtccggacagcagtcctccattaaggtagaagacattcagatgcacaactaccagcaacacagccacctgcccccccagtctgaggagatgatgccgcactccgggtcggtttactacaagccctcctcgcccccgacgcccaccaccccgggcttccaggtgcagcacagccccatgtgggacgacccgggatctctccacaacttccaccagaactacgtggccactacgcacatgatcgagcagaggaaaacgccagtctcccgcctctccctcttctcctttaagcaatcgccccctggcaccccggtgtctagttgccagatgcgcttcgacgggcccctgcacgtccccatgaacccggagcccgccggcagccaccacgtggtggacgggcagaccttcgctgtgcccaaccccattcgcaagcccgcgtccatgggcttcccgggcctgcagatcggccacgcgtctcagctgctcgacacgcaggtgccctcaccgccgtcgcggggctccccctccaacgaggggctgtgcgctgtgtgtggggacaacgcggcctgccaacactacggcgtgcgcacctgtgagggctgcaaaggcttctttaagcgcacagtgcaaaaaaatgcaaaatacgtgtgtttagcaaataaaaactgcccagtggacaagcgtcgccggaatcgctgtcagtactgccgatttcagaagtgcctggctgttgggatggtcaaagaagtggttcgcacagacagtttaaaaggccggagaggtcgtttgccctcgaaaccgaagagcccacaggagccctctcccccttcgcccccggtgagtctgatcagtgccctcgtcagggcccatgtcgactccaacccggctatgaccagcctggactatt

SEQ ID NO: 76 - DNA, 1368 bp, Homo Sapiens
  misc_feature (836)..(836): n is a, c, g, or t
  misc_feature (896)..(896): n is a, c, g, or t
  misc_feature (923)..(923): n is a, c, g, or t
  misc_feature (960)..(960): n is a, c, g, or t
  misc_feature (972)..(972): n is a, c, g, or t
  misc_feature (1023)..(1023): n is a, c, g, or t
  misc_feature (1042)..(1043): n is a, c, g, or t
  misc_feature (1049)..(1049): n is a, c, g, or t
  misc_feature (1058)..(1058): n is a, c, g, or t
  misc_feature (1065)..(1065): n is a, c, g, or t
  misc_feature (1067)..(1067): n is a, c, g, or t
  misc_feature (1085)..(1085): n is a, c, g, or t
  misc_feature (1090)..(1090): n is a, c, g, or t
  misc_feature (1098)..(1098): n is a, c, g, or t
  misc_feature (1100)..(1100): n is a, c, g, or t
  misc_feature (1103)..(1103): n is a, c, g, or t
  misc_feature (1108)..(1108): n is a, c, g, or t
  misc_feature (1118)..(1118): n is a, c, g, or t
  misc_feature (1122)..(1122): n is a, c, g, or t
  misc_feature (1133)..(1133): n is a, c, g, or t
  misc_feature (1139)..(1140): n is a, c, g, or t
  misc_feature (1162)..(1162): n is a, c, g, or t
  misc_feature (1166)..(1166): n is a, c, g, or t
  misc_feature (1172)..(1172): n is a, c, g, or t
  misc_feature (1174)..(1174): n is a, c, g, or t
  misc_feature (1177)..(1177): n is a, c, g, or t
  misc_feature (1183)..(1183): n is a, c, g, or t
  misc_feature (1189)..(1189): n is a, c, g, or t
  misc_feature (1193)..(1193): n is a, c, g, or t
  misc_feature (1198)..(1198): n is a, c, g, or t
  misc_feature (1211)..(1211): n is a, c, g, or t
  misc_feature (1216)..(1217): n is a, c, g, or t
  misc_feature (1222)..(1222): n is a, c, g, or t
  misc_feature (1230)..(1231): n is a, c, g, or t
  misc_feature (1236)..(1237): n is a, c, g, or t
  misc_feature (1243)..(1243): n is a, c, g, or t
  misc_feature (1246)..(1246): n is a, c, g, or t
  misc_feature (1252)..(1253): n is a, c, g, or t
  misc_feature (1261)..(1261): n is a, c, g, or t
  misc_feature (1264)..(1264): n is a, c, g, or t
  misc_feature (1268)..(1269): n is a, c, g, or t
  misc_feature (1271)..(1271): n is a, c, g, or t
  misc_feature (1275)..(1275): n is a, c, g, or t
  misc_feature (1278)..(1278): n is a, c, g, or t
  misc_feature (1292)..(1294): n is a, c, g, or t
  misc_feature (1296)..(1296): n is a, c, g, or t
  misc_feature (1303)..(1303): n is a, c, g, or t
  misc_feature (1307)..(1307): n is a, c, g, or t
  misc_feature (1312)..(1312): n is a, c, g, or t
  misc_feature (1337)..(1337): n is a, c, g, or t
  misc_feature (1341)..(1341): n is a, c, g, or t
  misc_feature (1347)..(1347): n is a, c, g, or t
  misc_feature (1356)..(1356): n is a, c, g, or t
  misc_feature (1361)..(1361): n is a, c, g, or t
  misc_feature (1365)..(1365): n is a, c, g, or t
  misc_feature (1367)..(1367): n is a, c, g, or t
tagagaaattactatgagaggatcgcatcaccatcaccatcacggatcctatttaggtgacactatagaatcgtcgacccacgcgtccgggcggttcgggagccgcggcttatggtgcagacatggccaagtccaagaaccacaccacacacaaccagtcccgaaaatggcacagaaatggtatcaagaaaccccgatcacaaagatacgaatctcttaagggggtggaccccaagttcctgaggaacatgcgctttgccaagaagcacaacaaaaagggcctaaagaagatgcaggccaacaatgccaaggccatgagtgcacgtgccgaggctatcaaggccctcgtaaagcccaaggaggttaagcccaagatcccaaagggtgtcagccgcaagctcgatcgacttgcctacattgcccaccccaagcttgggaagcgtgctcgtgcccgtattgccaaggggctcaggctgtgccggccaaaggccaaggccaaggccaaggccaaggccaaggatcaaaccaaggcccaggctgcagccccagcttcagttccagctcaggctcccaaacgtacccaggcccctacaaaggcttcagagtagatatctctgccaacatgaggacagaaggactggtgcgaccccccacccccgcccctgggctaccatctgcatggggctggggtcctcctgtgctatttgtacaaataaacctgaggcaggaaaaaaaaaaaaaaaaaaaaaaaagggcggccgctccctatagtgagtcgtattaagcttaattagctgagcttggactcctgttgatagatccagtaatgacctcanaactccatctggatttgttcaaaacgctcggttgccgccgggcgttttttttttggtganaatccaagctagcttggcgaaattttncaggagctaaggaagctaaaatgggagaaaaaaatcnctggatataccnccgttgatatatccccaatggcatcgtaaaaaaaattttgaggcatttcantcagttgctcatgtacctnnaaccanaccgttcanctggatntnacggcctttttaaaaacngtaanaaaataancncanttttntccggccttnttcncattttgcccncctgannatgcccctccgaatttctatgnaatnaaaaangnaanctgggnaatggnaaantttcnccttttttacccnttttnntgaanaatgaaannttttnnccttgnagnaaaccnnaaaattcnggntttnnancaanttncaaaaggggggttnnngnaaaacgncccntttcnaaggtttttaaaatttttccccccncccngggganttccctttnttaanggcnana

SEQ ID NO: 77 - DNA, 869 bp, Homo Sapiens
  misc_feature (521)..(521): n is a, c, g, or t
  misc_feature (699)..(699): n is a, c, g, or t
  misc_feature (705)..(705): n is a, c, g, or t
  misc_feature (732)..(732): n is a, c, g, or t
  misc_feature (749)..(749): n is a, c, g, or t
  misc_feature (762)..(763): n is a, c, g, or t
  misc_feature (768)..(768): n is a, c, g, or t
  misc_feature (774)..(774): n is a, c, g, or t
  misc_feature (812)..(812): n is a, c, g, or t
  misc_feature (827)..(827): n is a, c, g, or t
  misc_feature (834)..(834): n is a, c, g, or t
  misc_feature (837)..(838): n is a, c, g, or t
  misc_feature (840)..(840): n is a, c, g, or t
  misc_feature (868)..(868): n is a, c, g, or t
tagagaaattactatgagaggatcgcatcaccatcaccatcacggatcctatttaggtgacactatagaatcgtcgacccacgcgtccggagcggagagcggaccccagagagccctgagcagccccaccgccgccgccggcctagttaccatcacaccccgggaggagccgcagctgccgcagccggccccagtcaccatcaccgcaaccatgagcagcgaggccgagacccagcagccgcccgccgccccccccgccgcccccgccctcagcgccgccgacaccaagcccggcactacgggcagcggcgcagggagcggtggcccgggcggcctcacatcggcggcgcctgccggcggggacaagaaggtcatcgcaacgaaggttttgggaacagtaaaatggttcaatgtaaggaacggatatggtttcatcaacaggaatgacaccaaggaagatgtatttgtacaccagactgccataaagaagaataaccccaggaagtaccttcgcagtgtangagatggagagactgtggagtttgatgttgttgaaggagaaaagggtgcggaggcagcaaatgttacaggtcctggtggtgttccagttcaaggcagtaaatatgcagcagaccgtaaccattatagacgctatccacgtcgtaggggtcctccacgcaattaccagcaaaattaccngattantgagagtggggaaaagaacgagggatncggagagtgctcccganagccaggcccaannaacgncggccntaccgcaggcgaaggttccccaccttacttacatgcgnagaacccttatgggngttcgancanngntatttccaacctttccttgttccaggang

SEQ ID NO: 78 - DNA, 1264 bp, Homo Sapiens
  misc_feature (888)..(888): n is a, c, g, or t
  misc_feature (900)..(900): n is a, c, g, or t
  misc_feature (916)..(916): n is a, c, g, or t
  misc_feature (927)..(927): n is a, c, g, or t
  misc_feature (942)..(942): n is a, c, g, or t
  misc_feature (944)..(944): n is a, c, g, or t
  misc_feature (947)..(947): n is a, c, g, or t
  misc_feature (966)..(967): n is a, c, g, or t
  misc_feature (975)..(975): n is a, c, g, or t
  misc_feature (981)..(981): n is a, c, g, or t
  misc_feature (988)..(988): n is a, c, g, or t
  misc_feature (1010)..(1010): n is a, c, g, or t
  misc_feature (1016)..(1016): n is a, c, g, or t
  misc_feature (1031)..(1031): n is a, c, g, or t
  misc_feature (1036)..(1036): n is a, c, g, or t
  misc_feature (1063)..(1063): n is a, c, g, or t
  misc_feature (1070)..(1070): n is a, c, g, or t
  misc_feature (1087)..(1087): n is a, c, g, or t
  misc_feature (1098)..(1098): n is a, c, g, or t
  misc_feature (1119)..(1119): n is a, c, g, or t
  misc_feature (1123)..(1123): n is a, c, g, or t
  misc_feature (1131)..(1131): n is a, c, g, or t
  misc_feature (1145)..(1145): n is a, c, g, or t
  misc_feature (1150)..(1150): n is a, c, g, or t
  misc_feature (1158)..(1158): n is a, c, g, or t
  misc_feature (1183)..(1183): n is a, c, g, or t
  misc_feature (1187)..(1187): n is a, c, g, or t
  misc_feature (1192)..(1193): n is a, c, g, or t
  misc_feature (1197)..(1198): n is a, c, g, or t
  misc_feature (1234)..(1234): n is a, c, g, or t
  misc_feature (1236)..(1241): n is a, c, g, or t
  misc_feature (1248)..(1248): n is a, c, g, or t
  misc_feature (1251)..(1251): n is a, c, g, or t
  misc_feature (1253)..(1254): n is a, c, g, or t
  misc_feature (1256)..(1259): n is a, c, g, or t
  misc_feature (1264)..(1264): n is a, c, g, or t
attagagaaattactatgagaggatcgcatcaccatcaccatcacggatcctatttaggtgacactatagaatcgtcgacccacgcgtccgcttccagcaatagagacagggtaccaccttcatctgaagctagtgagcatcacccgcggcatcgtgtttcaagtcaagcggaagatacttccagcagctttgacaacctgtttattgacaggttacagaggatcaccattgcggaccaaggtgaacaacagtcagaagaaaacgcaagtactaagaacttgacaggcctttccagtgggactgagaagaaacctcattacatggaagtgctagaaatgcgagccaaaaacccagtgccccagctgcgtaaatttaaaaccaatgtgttaccttttcgacaaaatgattcatctagtcattgccagaagagtgggtctcctatttcctcagaagagcggcggcgcagggataagcagcatcttgatgacatcacagcagctcggcttctaccacttcaccatatgcccacgcagctgctctccatagaagaatccttggcacttcagaaacagcagaaacagaattatgaggagatgcaagcaaagctcgcagcgcaaaaattagctgaaagactgaatattaaaatgcggagttataatccagaaggggagtcttcagggagataccgagaagtaagggatgaagatgacgattggtcctctgatgaattctgaagataatctcctaaatcactgacgttgagatgtcatcatcttacatcagactttctaactagtatcaagatcagtgtcagatattgttgagggaagtaattttataaagttacacaaaggtagttataaaaaaaagcccagtttgtctttcanaaggtgactttncatgtgcttgaaaagntttaatatttngaatattggtgtttnanccncatgggtattaaaattttnncaatatantggggnattgggncggaaatttttagtaaaatagnaaaaanatacttttttttttnctttnaagcccaaatgaaaaaagagggaaacntttggcnttttttcccttttttcntaacccaatcnaaaaaaccattttattttacntggntcttttcnaggggaaaaaaacnttaantttgtttnccgggcccccttaaaattccatttnaggnaaaannaaannttcccccttcttttttgggggaaaaggaaaggggancnnnnnnaaaaaanttntnngnnnngtttn

SEQ ID NO: 79 - DNA, 1199 bp, Homo Sapiens
  misc_feature (819)..(819): n is a, c, g, or t
  misc_feature (875)..(875): n is a, c, g, or t
  misc_feature (888)..(888): n is a, c, g, or t
  misc_feature (890)..(890): n is a, c, g, or t
  misc_feature (896)..(896): n is a, c, g, or t
  misc_feature (908)..(908): n is a, c, g, or t
  misc_feature (920)..(920): n is a, c, g, or t
  misc_feature (926)..(926): n is a, c, g, or t
  misc_feature (964)..(964): n is a, c, g, or t
  misc_feature (971)..(971): n is a, c, g, or t
  misc_feature (983)..(983): n is a, c, g, or t
  misc_feature (996)..(996): n is a, c, g, or t
  misc_feature (1004)..(1004): n is a, c, g, or t
  misc_feature (1009)..(1009): n is a, c, g, or t
  misc_feature (1029)..(1029): n is a, c, g, or t
  misc_feature (1046)..(1046): n is a, c, g, or t
  misc_feature (1050)..(1050): n is a, c, g, or t
  misc_feature (1055)..(1055): n is a, c, g, or t
  misc_feature (1065)..(1065): n is a, c, g, or t
  misc_feature (1067)..(1067): n is a, c, g, or t
  misc_feature (1071)..(1072): n is a, c, g, or t
  misc_feature (1075)..(1075): n is a, c, g, or t
  misc_feature (1086)..(1086): n is a, c, g, or t
  misc_feature (1088)..(1088): n is a, c, g, or t
  misc_feature (1091)..(1092): n is a, c, g, or t
  misc_feature (1097)..(1097): n is a, c, g, or t
  misc_feature (1108)..(1108): n is a, c, g, or t
  misc_feature (1110)..(1110): n is a, c, g, or t
  misc_feature (1122)..(1123): n is a, c, g, or t
  misc_feature (1125)..(1125): n is a, c, g, or t
  misc_feature (1127)..(1127): n is a, c, g, or t
  misc_feature (1130)..(1131): n is a, c, g, or t
  misc_feature (1133)..(1133): n is a, c, g, or t
  misc_feature (1141)..(1141): n is a, c, g, or t
  misc_feature (1144)..(1144): n is a, c, g, or t
  misc_feature (1148)..(1148): n is a, c, g, or t
  misc_feature (1158)..(1158): n is a, c, g, or t
  misc_feature (1160)..(1160): n is a, c, g, or t
  misc_feature (1163)..(1163): n is a, c, g, or t
  misc_feature (1178)..(1178): n is a, c, g, or t
  misc_feature (1180)..(1180): n is a, c, g, or t
  misc_feature (1182)..(1182): n is a, c, g, or t
  misc_feature (1185)..(1185): n is a, c, g, or t
  misc_feature (1196)..(1196): n is a, c, g, or t
aattagagaaattactatgagaggatcgcatcaccatcaccatcacggatcctatttaggtgacactatagaatcgtcgacccacgcgtccgcccacgcgtccgctgaagaagaaattcaggaaatctgcttaaagatcttgcagctttatgctcggaaaaaggttgatctcacacacctggagggtgaagtggaaaaaagaaagcacgctatcgaagaggcaaaggcccaagcccggggcctgttgcctgggggcacacaggtgctggatggtacctcggggttctctcctgcccccaagctggtggaatcccccaaagaaggtaaagggagcaagccttccccactgtctgtgaagaacaccaagaggaggctggagggcgccaagaaagccaaggcggacagccccgtgaacggcttgccaaaggggcgagagagtcggagtcggagccggagccgtgagcagagctactcgaggtccccatcccgatcagcgtctcctaagaggaggaaaagtgacagcggctccacatctggtgggtccaagtcgcagagccgctcccggagcaggagtgactccccaccgagacaggccccccgcagcgctccctacaaaggctctgagattcggggctcccggaagtccaaggactgcaagtacccccagaagccacacaagtctcggagccggagttcttcccgttctcgaagcaggtcacgggagcgggcggataatccgggaaaatacaagaagaaaagtcattactacagagatcagcgacgagagcgctcgaggtcgtatgaacgcacaggccgtcnctatgagcgggaccaccctgggcacagcaggcatcggaagtgaggcggggttgcantgactggtggccncnagcccnttccctggggantaccctgatggntgcccnttgacccccgggggctgccctttgacccccgggtgggnctctcancgcaagtggtcntaaaaaaggattnttttttgnaaatntttgtccactggaccttggnggatttggaaatggaantgangggancggggaaccntncttnnaancggtctggggngnggnnccacncctgggcccgngnagggttcaattnngnancanntntgagggcnctnatgnaaaaatgaangnccncccccttttttgggngncnggnaatggcctggngtt

SEQ ID NO: 80 - DNA, 1373 bp, Homo Sapiens
  misc_feature (882)..(882): n is a, c, g, or t
  misc_feature (931)..(931): n is a, c, g, or t
  misc_feature (942)..(942): n is a, c, g, or t
  misc_feature (956)..(956): n is a, c, g, or t
  misc_feature (958)..(958): n is a, c, g, or t
  misc_feature (975)..(975): n is a, c, g, or t
  misc_feature (978)..(978): n is a, c, g, or t
  misc_feature (995)..(995): n is a, c, g, or t
  misc_feature (1035)..(1035): n is a, c, g, or t
  misc_feature (1042)..(1042): n is a, c, g, or t
  misc_feature (1050)..(1050): n is a, c, g, or t
  misc_feature (1058)..(1058): n is a, c, g, or t
  misc_feature (1071)..(1071): n is a, c, g, or t
  misc_feature (1081)..(1081): n is a, c, g, or t
  misc_feature (1087)..(1087): n is a, c, g, or t
  misc_feature (1100)..(1100): n is a, c, g, or t
  misc_feature (1102)..(1102): n is a, c, g, or t
  misc_feature (1105)..(1105): n is a, c, g, or t
  misc_feature (1111)..(1111): n is a, c, g, or t
  misc_feature (1123)..(1123): n is a, c, g, or t
  misc_feature (1132)..(1132): n is a, c, g, or t
  misc_feature (1136)..(1136): n is a, c, g, or t
  misc_feature (1146)..(1147): n is a, c, g, or t
  misc_feature (1161)..(1161): n is a, c, g, or t
  misc_feature (1163)..(1163): n is a, c, g, or t
  misc_feature (1177)..(1178): n is a, c, g, or t
  misc_feature (1187)..(1187): n is a, c, g, or t
  misc_feature (1191)..(1191): n is a, c, g, or t
  misc_feature (1199)..(1199): n is a, c, g, or t
  misc_feature (1201)..(1201): n is a, c, g, or t
  misc_feature (1205)..(1205): n is a, c, g, or t
  misc_feature (1207)..(1207): n is a, c, g, or t
  misc_feature (1210)..(1211): n is a, c, g, or t
  misc_feature (1215)..(1215): n is a, c, g, or t
  misc_feature (1219)..(1219): n is a, c, g, or t
  misc_feature (1222)..(1222): n is a, c, g, or t
  misc_feature (1224)..(1224): n is a, c, g, or t
  misc_feature (1229)..(1229): n is a, c, g, or t
  misc_feature (1232)..(1232): n is a, c, g, or t
  misc_feature (1235)..(1235): n is a, c, g, or t
  misc_feature (1238)..(1238): n is a, c, g, or t
  misc_feature (1246)..(1247): n is a, c, g, or t
  misc_feature (1275)..(1275): n is a, c, g, or t
  misc_feature (1281)..(1281): n is a, c, g, or t
  misc_feature (1290)..(1290): n is a, c, g, or t
  misc_feature (1302)..(1302): n is a, c, g, or t
  misc_feature (1304)..(1304): n is a, c, g, or t
  misc_feature (1306)..(1306): n is a, c, g, or t
  misc_feature (1309)..(1309): n is a, c, g, or t
  misc_feature (1319)..(1319): n is a, c, g, or t
  misc_feature (1321)..(1321): n is a, c, g, or t
  misc_feature (1329)..(1329): n is a, c, g, or t
  misc_feature (1333)..(1334): n is a, c, g, or t
  misc_feature (1338)..(1338): n is a, c, g, or t
  misc_feature (1341)..(1341): n is a, c, g, or t
  misc_feature (1344)..(1344): n is a, c, g, or t
  misc_feature (1351)..(1351): n is a, c, g, or t
  misc_feature (1360)..(1361): n is a, c, g, or t
  misc_feature (1363)..(1365): n is a, c, g, or t
  misc_feature (1373)..(1373): n is a, c, g, or t
atagagaaattactatgagaggatcgcatcaccatcaccatcacggatcctatttaggtgacactatagaatcgtcgacccacgcgtccgcccacgcgtccgccctcatccacgatggcctagcacgtggaattcgcgaagctgccaaagccttagacaagcgccaagcccatctttgtgtgcttgcatccaactgtgatgagcctatgtatgtcaagttggtggaggccctttgtgctgaacaccaaatcaacctaattaaggttgatgacaacaagaaactaggagaatgggtaggcctttgtaaaattgacagagaggggaaaccccgtaaagtggttggttgcagttgtgtagtagttaaggactatggcaaggagtctcaggccaaggatgtcattgaagagtatttcaaatgcaagaaatgaagaaataaatctttggctcacaaaaaaaaaaaaaaaaaaaaaaaaaaagggcggccgctccctatagtgagtcgtattaagcttaattagctgagcttggactcctgttgatagatccagtaatgacctcagaactccatctggatttgttcagaacgctcggttgccgccgggcgttttttattggtgagaatccaagctagcttggcgagattttcaggagctaaggaagctaaaatggagaaaaaaatcactggatataccaccgttgatatatcccaatggcatcgtaaagaacattttgaggcatttcagtcagttgctcaatgtacctataaccagaccgttcagctggatattacggcctttttaaagaccgtaaagaaaaataagcacaagttttatccggcctttattcacattcttgcccgcctgatgaatgctcatccggaanttcgtatggcaatgaaagacggtgagctggtgatatgggatagtgttcncccttgttacnccgttttccatgancnaaactgaaacgttttcntcnctctggagtgaataccncgacgatttccggcagtttctacccatatattcccaaaangtggcgngttacggngaaaaccngggcctatttccntaaagggttnattganaaaatttttttcncnccnccccancccctgggggantttccccantttngatttaaacnnggcccaaatggganancttcttcccccccnnttttccccngggnaaaaattnancccnanggnnaaangggnctnanccccnggnaantcnggttcccnngccctttgggaaggcctccccttccccnaaagtnttagaaatnaccaaaaccgcnananggngggggggggngnattttttngggnntttnggnccntaacccngggggaaanncnnncttgggan

SEQ ID NO: 81 - DNA, 1297 bp, Homo Sapiens
  misc_feature (7)..(7): n is a, c, g, or t
  misc_feature (512)..(512): n is a, c, g, or t
  misc_feature (571)..(571): n is a, c, g, or t
  misc_feature (597)..(597): n is a, c, g, or t
  misc_feature (627)..(627): n is a, c, g, or t
  misc_feature (640)..(641): n is a, c, g, or t
  misc_feature (654)..(654): n is a, c, g, or t
  misc_feature (673)..(674): n is a, c, g, or t
  misc_feature (689)..(689): n is a, c, g, or t
  misc_feature (693)..(693): n is a, c, g, or t
  misc_feature (700)..(700): n is a, c, g, or t
  misc_feature (702)..(702): n is a, c, g, or t
  misc_feature (711)..(711): n is a, c, g, or t
  misc_feature (715)..(715): n is a, c, g, or t
  misc_feature (725)..(725): n is a, c, g, or t
  misc_feature (734)..(734): n is a, c, g, or t
  misc_feature (741)..(741): n is a, c, g, or t
  misc_feature (744)..(744): n is a, c, g, or t
  misc_feature (747)..(747): n is a, c, g, or t
  misc_feature (753)..(754): n is a, c, g, or t
  misc_feature (762)..(762): n is a, c, g, or t
  misc_feature (775)..(775): n is a, c, g, or t
  misc_feature (778)..(778): n is a, c, g, or t
  misc_feature (782)..(782): n is a, c, g, or t
  misc_feature (791)..(791): n is a, c, g, or t
  misc_feature (794)..(794): n is a, c, g, or t
  misc_feature (798)..(798): n is a, c, g, or t
  misc_feature (804)..(804): n is a, c, g, or t
  misc_feature (806)..(806): n is a, c, g, or t
  misc_feature (811)..(813): n is a, c, g, or t
  misc_feature (815)..(817): n is a, c, g, or t
  misc_feature (825)..(826): n is a, c, g, or t
  misc_feature (832)..(832): n is a, c, g, or t
  misc_feature (834)..(834): n is a, c, g, or t
  misc_feature (837)..(838): n is a, c, g, or t
  misc_feature (842)..(842): n is a, c, g, or t
  misc_feature (846)..(846): n is a, c, g, or t
  misc_feature (849)..(849): n is a, c, g, or t
  misc_feature (851)..(851): n is a, c, g, or t
  misc_feature (855)..(855): n is a, c, g, or t
  misc_feature (858)..(858): n is a, c, g, or t
  misc_feature (861)..(863): n is a, c, g, or t
  misc_feature (866)..(866): n is a, c, g, or t
  misc_feature (875)..(875): n is a, c, g, or t
  misc_feature (877)..(877): n is a, c, g, or t
  misc_feature (879)..(879): n is a, c, g, or t
  misc_feature (881)..(881): n is a, c, g, or t
  misc_feature (884)..(884): n is a, c, g, or t
  misc_feature (887)..(887): n is a, c, g, or t
  misc_feature (889)..(890): n is a, c, g, or t
  misc_feature (899)..(901): n is a, c, g, or t
  misc_feature (904)..(907): n is a, c, g, or t
  misc_feature (909)..(909): n is a, c, g, or t
  misc_feature (912)..(912): n is a, c, g, or t
  misc_feature (914)..(915): n is a, c, g, or t
  misc_feature (917)..(918): n is a, c, g, or t
  misc_feature (936)..(937): n is a, c, g, or t
  misc_feature (939)..(939): n is a, c, g, or t
  misc_feature (941)..(942): n is a, c, g, or t
  misc_feature (947)..(948): n is a, c, g, or t
  misc_feature (950)..(954): n is a, c, g, or t
  misc_feature (958)..(960): n is a, c, g, or t
  misc_feature (965)..(965): n is a, c, g, or t
  misc_feature (967)..(969): n is a, c, g, or t
  misc_feature (973)..(973): n is a, c, g, or t
  misc_feature (975)..(975): n is a, c, g, or t
  misc_feature (978)..(980): n is a, c, g, or t
  misc_feature (982)..(983): n is a, c, g, or t
  misc_feature (985)..(986): n is a, c, g, or t
  misc_feature (988)..(990): n is a, c, g, or t
  misc_feature (992)..(994): n is a, c, g, or t
  misc_feature (998)..(998): n is a, c, g, or t
  misc_feature (1001)..(1004): n is a, c, g, or t
  misc_feature (1006)..(1006): n is a, c, g, or t
  misc_feature (1012)..(1018): n is a, c, g, or t
  misc_feature (1020)..(1021): n is a, c, g, or t
  misc_feature (1023)..(1023): n is a, c, g, or t
  misc_feature (1026)..(1028): n is a, c, g, or t
  misc_feature (1031)..(1032): n is a, c, g, or t
  misc_feature (1034)..(1035): n is a, c, g, or t
  misc_feature (1038)..(1038): n is a, c, g, or t
  misc_feature (1042)..(1042): n is a, c, g, or t
  misc_feature (1045)..(1049): n is a, c, g, or t
  misc_feature (1051)..(1051): n is a, c, g, or t
  misc_feature (1054)..(1054): n is a, c, g, or t
  misc_feature (1060)..(1061): n is a, c, g, or t
  misc_feature (1063)..(1064): n is a, c, g, or t
  misc_feature (1066)..(1070): n is a, c, g, or t
  misc_feature (1073)..(1074): n is a, c, g, or t
  misc_feature (1077)..(1077): n is a, c, g, or t
  misc_feature (1083)..(1083): n is a, c, g, or t
  misc_feature (1085)..(1085): n is a, c, g, or t
  misc_feature (1088)..(1088): n is a, c, g, or t
  misc_feature (1090)..(1090): n is a, c, g, or t
  misc_feature (1092)..(1092): n is a, c, g, or t
  misc_feature (1095)..(1096): n is a, c, g, or t
  misc_feature (1098)..(1100): n is a, c, g, or t
  misc_feature (1102)..(1102): n is a, c, g, or t
  misc_feature (1105)..(1105): n is a, c, g, or t
  misc_feature (1107)..(1108): n is a, c, g, or t
  misc_feature (1110)..(1110): n is a, c, g, or t
  misc_feature (1112)..(1113): n is a, c, g, or t
  misc_feature (1116)..(1116): n is a, c, g, or t
  misc_feature (1122)..(1123): n is a, c, g, or t
  misc_feature (1126)..(1129): n is a, c, g, or t
  misc_feature (1131)..(1132): n is a, c, g, or t
  misc_feature (1134)..(1135): n is a, c, g, or t
  misc_feature (1137)..(1137): n is a, c, g, or t
  misc_feature (1140)..(1140): n is a, c, g, or t
  misc_feature (1143)..(1143): n is a, c, g, or t
  misc_feature (1145)..(1145): n is a, c, g, or t
  misc_feature (1151)..(1155): n is a, c, g, or t
  misc_feature (1157)..(1158): n is a, c, g, or t
  misc_feature (1160)..(1160): n is a, c, g, or t
  misc_feature (1162)..(1169): n is a, c, g, or t
  misc_feature (1171)..(1171): n is a, c, g, or t
  misc_feature (1174)..(1177): n is a, c, g, or t
  misc_feature (1180)..(1181): n is a, c, g, or t
  misc_feature (1183)..(1184): n is a, c, g, or t
  misc_feature (1186)..(1187): n is a, c, g, or t
  misc_feature (1189)..(1191): n is a, c, g, or t
  misc_feature (1195)..(1197): n is a, c, g, or t
  misc_feature (1199)..(1200): n is a, c, g, or t
  misc_feature (1202)..(1204): n is a, c, g, or t
  misc_feature (1206)..(1206): n is a, c, g, or t
  misc_feature (1208)..(1210): n is a, c, g, or t
  misc_feature (1212)..(1212): n is a, c, g, or t
  misc_feature (1217)..(1218): n is a, c, g, or t
  misc_feature (1220)..(1220): n is a, c, g, or t
  misc_feature (1222)..(1222): n is a, c, g, or t
  misc_feature (1224)..(1225): n is a, c, g, or t
  misc_feature (1228)..(1228): n is a, c, g, or t
  misc_feature (1231)..(1231): n is a, c, g, or t
  misc_feature (1233)..(1233): n is a, c, g, or t
  misc_feature (1235)..(1236): n is a, c, g, or t
  misc_feature (1238)..(1241): n is a, c, g, or t
  misc_feature (1243)..(1250): n is a, c, g, or t
  misc_feature (1252)..(1252): n is a, c, g, or t
  misc_feature (1254)..(1254): n is a, c, g, or t
  misc_feature (1256)..(1257): n is a, c, g, or t
  misc_feature (1262)..(1265): n is a, c, g, or t
  misc_feature (1267)..(1269): n is a, c, g, or t
  misc_feature (1271)..(1271): n is a, c, g, or t
  misc_feature (1274)..(1274): n is a, c, g, or t
  misc_feature (1276)..(1276): n is a, c, g, or t
  misc_feature (1278)..(1280): n is a, c, g, or t
  misc_feature (1282)..(1282): n is a, c, g, or t
  misc_feature (1285)..(1286): n is a, c, g, or t
  misc_feature (1288)..(1288): n is a, c, g, or t
  misc_feature (1290)..(1297): n is a, c, g, or t
gaaaatnactatgagaggatcgcatcaccatcaccatcacggatcctatttaggtgacactatagaatcgtcgacccacgcgtccgaaaggcgcggcggggaggggagccggggccccagccctgccgggaaacgggttcccagtcccggccgagagcgcgggcgccgaggggaccgacccggactccccgcaaccccccaaccgccaggccatggcgcccacggggctcctggtggccggcgcctccttcctcgcgttccgggggctgcactgggggttgcggcggctgcccacgccggaatcggccgctcgggaccgctggcagtggtggaacctctgcgtctccctggcgcacagcctgctctcggggaccggggcgctgctcggcctgtcactgtaccctcagatggccgccgaccccatccatggccacccgcgctgggctctggtgctggtggctgtgtctgtgggttacttcctggcagacggagctgacctgctgtggaaccanaccttgggcaagacctgggatcttctctgtcatcatttggtggtggtgagctgcctcancaccgctgttctgtctggccactacntgggcttctccatggtgtctctgctcctgnaactgaactccannctgggcaacaaantgagactcttgtctctaannaaaaaaaaaaaaaangaanaactggnanttttctganatanattcataaantcttcttcntccctgntgnttntgctgnntttttttntgttgaaaaaaanccnttcnttccaaaanatntaanttaatngnaaatnnncnnnaaaattanntttgantnttnnattnaaantgnanttanaanaannnaanttttttatntntntnaanaanannttttttttnnnaannnnanaananntnnaaattttttttttaaaannanannttttnnannnnnatannnttttntnnntaantnaannntnntnntnnntnnntaanaannnnanaaatannnnnnntnntnttnnnttnnannttnaaantannnnnantantttttnntnntnnnnntannaantttttnanaantntnatnntnnnanaananntntnntanttaaannatnnnnannanntnttnatnanttattnnnnnannanannnnnnnnanatnnnnatnnanntnntnnnaaannntnntnnnantnnntntatanntntntnnttnatnantnntnnnntnnnnnnnnananannataannnntnnntntanantnnntnatnntntnnnnnnnn

SEQ ID NO: 82 - DNA, 1200 bp, Homo Sapiens
  misc_feature (878)..(878): n is a, c, g, or t
  misc_feature (958)..(958): n is a, c, g, or t
  misc_feature (967)..(967): n is a, c, g, or t
  misc_feature (976)..(976): n is a, c, g, or t
  misc_feature (979)..(979): n is a, c, g, or t
  misc_feature (995)..(995): n is a, c, g, or t
  misc_feature (1010)..(1010): n is a, c, g, or t
  misc_feature (1031)..(1031): n is a, c, g, or t
  misc_feature (1065)..(1065): n is a, c, g, or t
  misc_feature (1086)..(1086): n is a, c, g, or t
  misc_feature (1088)..(1088): n is a, c, g, or t
  misc_feature (1090)..(1090): n is a, c, g, or t
  misc_feature (1101)..(1101): n is a, c, g, or t
  misc_feature (1119)..(1119): n is a, c, g, or t
  misc_feature (1127)..(1127): n is a, c, g, or t
  misc_feature (1136)..(1136): n is a, c, g, or t
  misc_feature (1140)..(1141): n is a, c, g, or t
  misc_feature (1152)..(1152): n is a, c, g, or t
  misc_feature (1157)..(1157): n is a, c, g, or t
  misc_feature (1168)..(1168): n is a, c, g, or t
  misc_feature (1181)..(1181): n is a, c, g, or t
  misc_feature (1185)..(1185): n is a, c, g, or t
  misc_feature (1187)..(1187): n is a, c, g, or t
  misc_feature (1190)..(1190): n is a, c, g, or t
  misc_feature (1198)..(1198): n is a, c, g, or t
tagagaaattactatgagaggatcgcatcaccatcaccatcacggatcctatttaggtgacactatagaatcgtcgacccacgcgtccgcagctgcctctgtactggggagtcacggagtggccgggctccagggacatggcggcggcctctgcggtgtcggtgctgctggtggcggcggagaggaaccggtggcatcgtctcccgagcctgctcctgccgccgaggacatgggtgtggaggcaaagaaccatgaagtacacaacagccacaggaagaaacattaccaaggtcctcattgcaaacagaggagaaattgcctgcagggtgatgcgcacagccaaaaaactgggtgtacagactgtggcggtttatagtgaggctgacagaaattccatgcatgtagatatggcagatgaagcatattccatcggccccgctccctcccagcagagctacctatctatggagaaaatcattcaagtggccaagacctctgctgcacaggctatccatccaggatgcggttttctttcagaaaacatggaatttgctgaactttgtaagcaagaaggaattatttttataggccctcctccatctgcaattagagacatgggtataaagagcacatccaaatccataatggctgctgctggagtacctgttgtggagggttatcatggtgaggaccaatcagaccagtgcctgaaggaacacgccaggagaattggctatcctgtcatgattaaagccgtccggggtggaggaggaaaaggaatgaggattgttagatcagaacaagaatttcaagaacagttagagtcagcacggagagaagctaagaagtctttcaatgatgatgctatgctgatcganaagtttgtagacacaccgaggcatgtaaaagtccaggtgtttggtgatcaccatggcaatgctgtgtacttgtttgaaanaaactgtantgtgcaaangcnacatcaaaaaatcatngaggaagccctaacncctggtattaaatctgaaatnaaaaaaaacttgggaaaaactgcattcaaaactnctaaactttaaatttttttgnancnggactggggantttattttggactcaaanataatttntgtttctgnaaannaaaaaaggctncaagngaaacttcttntttttgaaaaaantccngnacntacttggngg

SEQ ID NO: 83 - DNA, 1195 bp, Homo Sapiens
  misc_feature (831)..(831): n is a, c, g, or t
  misc_feature (856)..(856): n is a, c, g, or t
  misc_feature (886)..(886): n is a, c, g, or t
  misc_feature (892)..(892): n is a, c, g, or t
  misc_feature (901)..(901): n is a, c, g, or t
  misc_feature (904)..(904): n is a, c, g, or t
  misc_feature (907)..(907): n is a, c, g, or t
  misc_feature (912)..(912): n is a, c, g, or t
  misc_feature (919)..(919): n is a, c, g, or t
  misc_feature (927)..(927): n is a, c, g, or t
  misc_feature (948)..(948): n is a, c, g, or t
  misc_feature (955)..(955): n is a, c, g, or t
  misc_feature (985)..(985): n is a, c, g, or t
  misc_feature (987)..(987): n is a, c, g, or t
  misc_feature (989)..(989): n is a, c, g, or t
  misc_feature (1005)..(1005): n is a, c, g, or t
  misc_feature (1009)..(1009): n is a, c, g, or t
  misc_feature (1018)..(1018): n is a, c, g, or t
  misc_feature (1024)..(1024): n is a, c, g, or t
  misc_feature (1027)..(1027): n is a, c, g, or t
  misc_feature (1057)..(1057): n is a, c, g, or t
  misc_feature (1077)..(1077): n is a, c, g, or t
  misc_feature (1095)..(1095): n is a, c, g, or t
  misc_feature (1100)..(1100): n is a, c, g, or t
  misc_feature (1103)..(1103): n is a, c, g, or t
  misc_feature (1110)..(1110): n is a, c, g, or t
  misc_feature (1120)..(1121): n is a, c, g, or t
  misc_feature (1139)..(1140): n is a, c, g, or t
  misc_feature (1145)..(1145): n is a, c, g, or t
  misc_feature (1174)..(1174): n is a, c, g, or t
  misc_feature (1177)..(1177): n is a, c, g, or t
  misc_feature (1179)..(1180): n is a, c, g, or t
  misc_feature (1182)..(1182): n is a, c, g, or t
gattagagagaattactatgagaggatcgcatcaccatcaccatcacggatcctatttaggtgacactatagaatcgtcgacccacgcgtccgcacacagggcgtgcaggccccagcgtggggaggaacgacattcgagtgcagctgctcgactatgtcatcagctccttttaccccgagatccaggctgctcatgccagcgacagcgtgcagagaaatgctgccttcttccgggaggtgacgcggcgcacggcgcggatggtggccgagtggcagtgtgtgggcttctgccacggcgtgctcaacaccgacaacatgagcatcctggggctcaccatcgactacgggccctttggcttcctggacaggtacgaccccgaccacgtgtgcaatgcctccgacaacaccggccgctacgcgtacagcaagcagcccgaggtgtgcaggtggaacctgcggaagctggccgaggccctgcagccggaactgcccctggagctgggggaggccatcctggccgaggagtttgacgccgagttccaaaggcactacctgcagaagatgcgcaggaagctgggcctcgtgcaggtggagctggaggaagacggggcgctggtgtccaagctcctggagaccatgcatctgaccggtgccgacttcacaaacaccttctacttgctgagctccttcccagtggagctagagtcgccaggcctggcggaattcctggccaggctgatggagcagtgtgcctccctggaggagctgaggctggccttccggccccagatggatccccggcagctatccatgatgctgatgctggcgcantcaaacccgcagctgttcgcgcttnatgggcacccgggcaggcatcgccaggganctggancgtgtggancancantctcngctggancacctgantgcggcaaaactgcaaaacangaaccanggccactgggctgactggctacaggcgtanananccccggctggacaagnactnggaaaggcnctgggnacnctgccccctggcaggctgaacacgtgcccntgaagcaccccaacaacccnaaatacgtgctgaagaantaatnccnccaaaangccatcaagnnttccaaaccggggaattnncaaangggcgggggggtttaaaaatattggaaanccntnncnctgggaagggggg

SEQ ID NO: 84 - DNA, 987 bp, Homo Sapiens
  misc_feature (801)..(801): n is a, c, g, or t
  misc_feature (822)..(822): n is a, c, g, or t
  misc_feature (854)..(854): n is a, c, g, or t
  misc_feature (884)..(884): n is a, c, g, or t
  misc_feature (967)..(967): n is a, c, g, or t
aatagagaaattactatgagaggatcgcatcaccatcaccatcacggatcctatttaggtgacactatagaatcgtcgacccacgcgtccgcggacgagaagccctaccagtgcccggtgtgccagcagcgcttcaagcgcaaggaccgcatgagctaccacgtgcgctcacatgacggcgctgtgcacaagccctacaactgctcccactgtggcaagagcttctcccggccggatcacctcaacagtcacgtcagacaagtgcactcaacagaacggcccttcaaatgtgagaaatgtgaggcagctttcgccacgaaggatcggctgcgggcgcacacagtacgacacgaggagaaagtgccatgtcacgtgtgtggcaagatgctgagctcggcttatatttcggaccacatgaaggtgcacagccagggtcctcaccatgtctgtgagctctgcaacaaaggcttcaccacggcagcatacctgcgcatccacgcggtgaaggaccacgggctccaggccccgcgggctgaccgcatcctgtgcaagctgtgcagcgtgcactgcaagacccctgcccagctggccggccacatgcagacccatctggggggggccgccccccctgtcccgggagacgccccccagccacagcccacctgctgagggggacccccgcacccaccaggtactggtgaggtttgtccaatggcggcggcagcggcagcggcggcagcggcagcagcggcagcagtagcagcccctcccacagctgtgggctccctctcgggggcgganggggtgcctgtgagctctcanccacttccctcccaaccctggtgagctccaanttggttgcgggggaaaaggggaaaatggantaaagtccccttggtacaagctcctctccccctcttttcccaccaactcctatttccctaccaaccaaggagcctccaaaagnaaaggaggaaaaatgttttc

SEQ ID NO: 85 - DNA, 941 bp, Homo Sapiens
tcgcatcaccatcaccatcacggatcctatttaggtgacactatagaatcgtcgacccacgcgtccgcgagcgaggccggccgcgccatgcacctgatgaagaagcgggagaagcagcgcgagcagatggagcagatgaagcagcgcatcgcggaggagaacatcatgaaatccaacattgacaagaagttctctgcgcactacgacgcggtggaggcagagctcaagtccagcaccgtgggtctcgtgaccctgaatgacatgaaggccaagcaggaggctctggtgaaggagcgggagaagcagctggccaagaaggagcagtccaaggagctgcagatgaagctggagaagcttcgagagaaggagcgtaagaaggaagccaagcggaagatctccagcctgtccttcaccctggaggaggaagaagagggaggcgaggaggaagaggaggcggccatgtatgaggaggagatggaaagggaagagatcaccacgaagaagagaaaactggggaagaacccagacgttgacacaagcttcttgcctgatcgagaccgtgaggaggaggagaatcggcttcgggaagagctgcggcaggagtgggaagccaagcaggagaagatcaagagtgaggagatcgagatcaccttcagctactgggatggctctgggcaccggcggacagtcaagatgagaaagggcaacaccatgcagcagttcctgcagaaggtgctcgagatccttcggaaagacttcagtgagctgaggtccgcaggggtggagcagctcatgtacatcaaggaggacttgatcatccctcaccatcacagcttctacgacttcatcgtcaccaaggcacggggggaagagtggaccactcttcactttgatgttcatgacgatgtgcggttgctcagtgacgccactgtggagaagga

SEQ ID NO: 86 - DNA, 1394 bp, Homo Sapiens
  misc_feature (963)..(963): n is a, c, g, or t
  misc_feature (974)..(974): n is a, c, g, or t
  misc_feature (984)..(984): n is a, c, g, or t
  misc_feature (990)..(990): n is a, c, g, or t
  misc_feature (993)..(993): n is a, c, g, or t
  misc_feature (995)..(995): n is a, c, g, or t
  misc_feature (1006)..(1006): n is a, c, g, or t
  misc_feature (1013)..(1013): n is a, c, g, or t
  misc_feature (1018)..(1018): n is a, c, g, or t
  misc_feature (1020)..(1020): n is a, c, g, or t
  misc_feature (1023)..(1023): n is a, c, g, or t
  misc_feature (1030)..(1031): n is a, c, g, or t
  misc_feature (1053)..(1053): n is a, c, g, or t
  misc_feature (1057)..(1057): n is a, c, g, or t
  misc_feature (1059)..(1059): n is a, c, g, or t
  misc_feature (1069)..(1069): n is a, c, g, or t
  misc_feature (1104)..(1104): n is a, c, g, or t
  misc_feature (1112)..(1114): n is a, c, g, or t
  misc_feature (1116)..(1127): n is a, c, g, or t
  misc_feature (1129)..(1135): n is a, c, g, or t
  misc_feature (1142)..(1143): n is a, c, g, or t
  misc_feature (1147)..(1147): n is a, c, g, or t
  misc_feature (1149)..(1149): n is a, c, g, or t
  misc_feature (1153)..(1153): n is a, c, g, or t
  misc_feature (1164)..(1164): n is a, c, g, or t
  misc_feature (1167)..(1167): n is a, c, g, or t
  misc_feature (1170)..(1170): n is a, c, g, or t
  misc_feature (1177)..(1177): n is a, c, g, or t
  misc_feature (1192)..(1192): n is a, c, g, or t
  misc_feature (1194)..(1194): n is a, c, g, or t
  misc_feature (1205)..(1205): n is a, c, g, or t
  misc_feature (1208)..(1208): n is a, c, g, or t
  misc_feature (1213)..(1214): n is a, c, g, or t
  misc_feature (1217)..(1217): n is a, c, g, or t
  misc_feature (1219)..(1219): n is a, c, g, or t
  misc_feature (1223)..(1223): n is a, c, g, or t
  misc_feature (1227)..(1227): n is a, c, g, or t
  misc_feature (1236)..(1236): n is a, c, g, or t
  misc_feature (1243)..(1243): n is a, c, g, or t
  misc_feature (1246)..(1246): n is a, c, g, or t
  misc_feature (1258)..(1258): n is a, c, g, or t
  misc_feature (1262)..(1262): n is a, c, g, or t
  misc_feature (1268)..(1268): n is a, c, g, or t
  misc_feature (1275)..(1275): n is a, c, g, or t
  misc_feature (1278)..(1278): n is a, c, g, or t
  misc_feature (1284)..(1285): n is a, c, g, or t
  misc_feature (1306)..(1307): n is a, c, g, or t
  misc_feature (1311)..(1314): n is a, c, g, or t
  misc_feature (1320)..(1320): n is a, c, g, or t
  misc_feature (1336)..(1336): n is a, c, g, or t
  misc_feature (1340)..(1340): n is a, c, g, or t
  misc_feature (1346)..(1346): n is a, c, g, or t
  misc_feature (1357)..(1357): n is a, c, g, or t
  misc_feature (1371)..(1371): n is a, c, g, or t
  misc_feature (1376)..(1378): n is a, c, g, or t
  misc_feature (1381)..(1381): n is a, c, g, or t
  misc_feature (1386)..(1387): n is a, c, g, or t
  misc_feature (1394)..(1394): n is a, c, g, or t
aatagagaaattactatgagaggatcgcatcaccatcaccatcacggatcctatttaggtgacactatagaatcgtcgacccacgcgtccggccgaccaggaagtcgagctggaagcaaagctggcagcagggccagcagccgccgaggcagtgatgcatcagactttgacatttcagaaatccagtccgtgtgctcagatgtggaaactgtcccccagacacacagacctacaccccgagcaggttctcggccatccacagcgaagccttcaaaaatccccacgccccagaggaaatcacctgccagcaaattggacaagtcctcaaagagatagtgcaattggttctaccaaggcccttccttgagcatttattatttaagtttgaacgatgtaaaatatggtgtagaaattcttgtgaaatattgcaagaggcgagtttaaaattctgcagatggccttatttgtgtatttgtctttttattttatctgtataattttttttgtcagatattctggggttaaagtcacatcatatgtgaggaggaaaagtttaacatgaactaacatttctgcactgtaacgtgccgggcacacactaaactcagttactgtacctacaggtaagtctacatcctctctgacagccacagcactacatcaatccctgacgttagggatacctcatgacattttcctgtttttatggaaactctgagaagctgaatgatacatgcaggggatattttttgagatgatttaaatgtaaaccaaaagatggaagacaaaaagacaaacacacccacacgcagtctttgcagtatctgacagagaactcacaggaagttacttcaagcacttgccagtactatgatattcaagtaccttgcagcatttctctgccattgctttcatgaggccagaggcatcctggatattaaacctattatactgtaagaatanaagtataaagngcgttcatanacatgngangnttttcttttgncttgagnggacngnaancccctgnntcattgaactcattttggatcnaaancnaattttgctngcaaaagctatgaaaaaaaaacccgtcccttaacngcaaaaannnannnnnnnnnnnnannnnnnnaaagggnnggcncncccnaaagggggccnaanaancttaatnaccggacctgggacncnggttgaaaaanccnaaagnnccncnaaancccncgggatttnttcaaanccncgggtgcccccngggntttttnttggggnaancccccnncttggggaaattttcggggcnngggnnnnaggggnaaaaaacccggggaancccnggaaantcccgggcccnaaaaaatttggggnttttnnngtnccggnnaaaaaan

SEQ ID NO: 87 - DNA, 1423 bp, Homo Sapiens
  misc_feature (587)..(587): n is a, c, g, or t
  misc_feature (614)..(614): n is a, c, g, or t
  misc_feature (661)..(661): n is a, c, g, or t
  misc_feature (701)..(701): n is a, c, g, or t
  misc_feature (730)..(730): n is a, c, g, or t
  misc_feature (740)..(740): n is a, c, g, or t
  misc_feature (743)..(743): n is a, c, g, or t
  misc_feature (751)..(751): n is a, c, g, or t
  misc_feature (754)..(754): n is a, c, g, or t
  misc_feature (757)..(757): n is a, c, g, or t
  misc_feature (759)..(759): n is a, c, g, or t
  misc_feature (762)..(762): n is a, c, g, or t
  misc_feature (783)..(783): n is a, c, g, or t
  misc_feature (791)..(791): n is a, c, g, or t
  misc_feature (825)..(825): n is a, c, g, or t
  misc_feature (829)..(830): n is a, c, g, or t
  misc_feature (835)..(835): n is a, c, g, or t
  misc_feature (838)..(838): n is a, c, g, or t
  misc_feature (841)..(841): n is a, c, g, or t
  misc_feature (848)..(848): n is a, c, g, or t
  misc_feature (850)..(850): n is a, c, g, or t
  misc_feature (856)..(856): n is a, c, g, or t
  misc_feature (862)..(862): n is a, c, g, or t
  misc_feature (869)..(869): n is a, c, g, or t
  misc_feature (873)..(873): n is a, c, g, or t
  misc_feature (878)..(879): n is a, c, g, or t
  misc_feature (886)..(888): n is a, c, g, or t
  misc_feature (893)..(893): n is a, c, g, or t
  misc_feature (897)..(897): n is a, c, g, or t
  misc_feature (899)..(901): n is a, c, g, or t
  misc_feature (904)..(904): n is a, c, g, or t
  misc_feature (907)..(907): n is a, c, g, or t
  misc_feature (913)..(913): n is a, c, g, or t
  misc_feature (916)..(916): n is a, c, g, or t
  misc_feature (918)..(918): n is a, c, g, or t
  misc_feature (927)..(927): n is a, c, g, or t
  misc_feature (931)..(931): n is a, c, g, or t
  misc_feature (934)..(934): n is a, c, g, or t
  misc_feature (937)..(937): n is a, c, g, or t
  misc_feature (947)..(947): n is a, c, g, or t
  misc_feature (949)..(949): n is a, c, g, or t
  misc_feature (960)..(960): n is a, c, g, or t
  misc_feature (967)..(967): n is a, c, g, or t
  misc_feature (974)..(974): n is a, c, g, or t
  misc_feature (977)..(977): n is a, c, g, or t
  misc_feature (984)..(985): n is a, c, g, or t
  misc_feature (993)..(993): n is a, c, g, or t
  misc_feature (999)..(999): n is a, c, g, or t
  misc_feature (1002)..(1002): n is a, c, g, or t
  misc_feature (1004)..(1004): n is a, c, g, or t
  misc_feature (1007)..(1007): n is a, c, g, or t
  misc_feature (1009)..(1011): n is a, c, g, or t
  misc_feature (1017)..(1017): n is a, c, g, or t
  misc_feature (1029)..(1029): n is a, c, g, or t
  misc_feature (1032)..(1032): n is a, c, g, or t
  misc_feature (1035)..(1035): n is a, c, g, or t
  misc_feature (1039)..(1039): n is a, c, g, or t
  misc_feature (1047)..(1047): n is a, c, g, or t
  misc_feature (1051)..(1051): n is a, c, g, or t
  misc_feature (1057)..(1057): n is a, c, g, or t
  misc_feature (1070)..(1070): n is a, c, g, or t
  misc_feature (1077)..(1077): n is a, c, g, or t
  misc_feature (1082)..(1083): n is a, c, g, or t
  misc_feature (1085)..(1085): n is a, c, g, or t
  misc_feature (1087)..(1087): n is a, c, g, or t
  misc_feature (1091)..(1091): n is a, c, g, or t
  misc_feature (1097)..(1097): n is a, c, g, or t
  misc_feature (1105)..(1105): n is a, c, g, or t
  misc_feature (1114)..(1114): n is a, c, g, or t
  misc_feature (1117)..(1117): n is a, c, g, or t
  misc_feature (1121)..(1121): n is a, c, g, or t
  misc_feature (1125)..(1125): n is a, c, g, or t
  misc_feature (1127)..(1127): n is a, c, g, or t
  misc_feature (1136)..(1136): n is a, c, g, or t
  misc_feature (1138)..(1139): n is a, c, g, or t
  misc_feature (1141)..(1142): n is a, c, g, or t
  misc_feature (1145)..(1145): n is a, c, g, or t
  misc_feature (1148)..(1148): n is a, c, g, or t
  misc_feature (1150)..(1150): n is a, c, g, or t
  misc_feature (1156)..(1157): n is a, c, g, or t
  misc_feature (1162)..(1162): n is a, c, g, or t
  misc_feature (1168)..(1168): n is a, c, g, or t
  misc_feature (1170)..(1171): n is a, c, g, or t
  misc_feature (1173)..(1173): n is a, c, g, or t
  misc_feature (1181)..(1181): n is a, c, g, or t
  misc_feature (1184)..(1184): n is a, c, g, or t
  misc_feature (1188)..(1188): n is a, c, g, or t
  misc_feature (1194)..(1195): n is a, c, g, or t
  misc_feature (1198)..(1199): n is a, c, g, or t
  misc_feature (1210)..(1210): n is a, c, g, or t
  misc_feature (1216)..(1216): n is a, c, g, or t
  misc_feature (1220)..(1220): n is a, c, g, or t
  misc_feature (1223)..(1226): n is a, c, g, or t
  misc_feature (1237)..(1238): n is a, c, g, or t
  misc_feature (1242)..(1242): n is a, c, g, or t
  misc_feature (1247)..(1247): n is a, c, g, or t
  misc_feature (1249)..(1251): n is a, c, g, or t
  misc_feature (1257)..(1258): n is a, c, g, or t
  misc_feature (1262)..(1262): n is a, c, g, or t
  misc_feature (1271)..(1271): n is a, c, g, or t
  misc_feature (1286)..(1288): n is a, c, g, or t
  misc_feature (1294)..(1294): n is a, c, g, or t
  misc_feature (1298)..(1299): n is a, c, g, or t
  misc_feature (1305)..(1305): n is a, c, g, or t
  misc_feature (1307)..(1308): n is a, c, g, or t
  misc_feature (1310)..(1310): n is a, c, g, or t
  misc_feature (1312)..(1312): n is a, c, g, or t
  misc_feature (1318)..(1318): n is a, c, g, or t
  misc_feature (1321)..(1321): n is a, c, g, or t
  misc_feature (1325)..(1325): n is a, c, g, or t
  misc_feature (1330)..(1330): n is a, c, g, or t
  misc_feature (1334)..(1334): n is a, c, g, or t
  misc_feature (1340)..(1340): n is a, c, g, or t
  misc_feature (1351)..(1351): n is a, c, g, or t
  misc_feature (1355)..(1358): n is a, c, g, or t
  misc_feature (1365)..(1365): n is a, c, g, or t
  misc_feature (1367)..(1367): n is a, c, g, or t
  misc_feature (1369)..(1369): n is a, c, g, or t
  misc_feature (1371)..(1371): n is a, c, g, or t
  misc_feature (1373)..(1375): n is a, c, g, or t
  misc_feature (1377)..(1378): n is a, c, g, or t
  misc_feature (1383)..(1384): n is a, c, g, or t
  misc_feature (1388)..(1388): n is a, c, g, or t
  misc_feature (1393)..(1393): n is a, c, g, or t
  misc_feature (1397)..(1398): n is a, c, g, or t
  misc_feature (1403)..(1404): n is a, c, g, or t
  misc_feature (1406)..(1406): n is a, c, g, or t
  misc_feature (1409)..(1409): n is a, c, g, or t
  misc_feature (1411)..(1414): n is a, c, g, or t
  misc_feature (1417)..(1417): n is a, c, g, or t
  misc_feature (1419)..(1419): n is a, c, g, or t
  misc_feature (1421)..(1421): n is a, c, g, or t
tagagaaattactatgagaggatcgcatcaccatcaccatcacggatcctatttaggtgacactatagaatcgtcgacccacgcgtccgcctcgacaacctatcgaaggcgccatggagcgaccggcgcccctggccgtgcttcccttctcggaccccgcgcacgccctgagcctgctgcgcggcctgagccagctgcgcgccgagcgcaagttcctggacgtgaccctggaggcggcgggcgggcgcgacttcccggcgcaccgtgcggtgctggccgccgccagcccctacttccgcgccatgttcgcggggcagctgcgcgagagccgcgccgagcgggtgcgcctgcacggagtgcctcccgacatgctgcagctgctgctggacttcagctacacgggccgcgtggcggtaagcggcgacaacgctgagccgctgctgcgcgccgccgacctgctgcagttcccggccgtgaaggaggcgtgcggggccttcctgcagcagcagctcgacctggccaactgcctggacatgcaggacttcgctgaggccttcagctgctcgggactggcgagcgcggcgcancggttcattctgcgccacgtgggcganctgggcgccgagcagctggagcggctgccactggcgcgcctgctgcnctacctgcgggacgacgggctgtgtgtgcccaaggaggangccgcctaccagctggcgctgcgctgggnccgcgctganccnccgcgccncgncgngncanttgggccgcaactgctggaangccgtgcncctgcccttcgttgcgcccgcttctacctgatgncgcnnattcnagnccnaacccgntngtggangcgctncccaccntggnctgcnnctgctgnnncgaangaancnnnaanttncaggcnggnangttaaaacnccanaancancgggtccctntncccaaaaaganttctttncccgttnacnggtattnnccaaaaantccttntgntnttngnnngttttncaaccaaaaatnttnaancaanttgttcantatncaaatnttaaaacccccanaaaaggnataanngngnatancttgancaaatttnccaaaaaanctngtgngaantnaacaaattntnngnntgntananaaattnnaatanagagtngnncnaaagatcncgntttnaaaaanngtnnaaagaaaaaanaacctntaanttnnnntaaatatcccnnattnaaaancnnnaaaacnncatnctctttttnaaaatatatatagtnnntcaccnaaanntaattnannananatattnttngaanacctnaaanaaaaancaaaaaatttnactnnnnttgggantntntnannntnnctttnntaanaaatnatannatatnnanaanannnnttntnantt

SEQ ID NO: 88 - DNA, 1001 bp, Homo Sapiens
  misc_feature (802)..(802): n is a, c, g, or t
  misc_feature (832)..(832): n is a, c, g, or t
  misc_feature (845)..(845): n is a, c, g, or t
  misc_feature (867)..(867): n is a, c, g, or t
  misc_feature (872)..(872): n is a, c, g, or t
  misc_feature (886)..(886): n is a, c, g, or t
  misc_feature (888)..(888): n is a, c, g, or t
  misc_feature (891)..(891): n is a, c, g, or t
  misc_feature (897)..(897): n is a, c, g, or t
  misc_feature (938)..(938): n is a, c, g, or t
  misc_feature (951)..(951): n is a, c, g, or t
  misc_feature (958)..(958): n is a, c, g, or t
  misc_feature (964)..(964): n is a, c, g, or t
  misc_feature (975)..(975): n is a, c, g, or t
  misc_feature (981)..(981): n is a, c, g, or t
  misc_feature (983)..(983): n is a, c, g, or t
  misc_feature (990)..(990): n is a, c, g, or t
  misc_feature (1001)..(1001): n is a, c, g, or t
atagagaaaattactatggagaggatcgcatcaccatcaccatcacggatcctatttaggtgacactatagaatcgtcgacccacgcgtccgcacgagctccgtgccgtcaaagggcccctgctgtactgcgcccggcccccacaggacctcaagattgtccccttggggcggaaagaagccaaggccaaggagctggtgcggcagctgcagctggaggccgaggagcagaggaagcagaagaagcggcagagtgtgtcgggcctgcacagataccttcacttgctggatggaaatgaaaattacccgtgccttgtggatgcagacggtgatgtgatttccttcccaccaataaccaacagtgagaagacaaaggttaagaaaacgacttctgatttgtttttggaagtaacaagtgccaccagtctgcagatttgcaaggatgtcatggatgccctcattctgaaaatggcagaaatgaaaaagtacactttagaaaataaagaggaaggatcactctcagatactgaagccgatgcagtctctggacaacttccagatcccacaacgaatcccagtgctggaaaggacgggccctcccttctggtggtggagcaggtccgggtggtggatctggaagggagcctgaaggtggtgtacccgtccaaggccgacctggccactgcccctccccacgtgactatcgtgcgctgacgccagggccgcctgtccgcgtttgtttggccggttttgcggaggtttctatgcggcaatgctgaattatccgttagattttcaccccnagttttttttgttggttttttttttttganaatggaagtctcncctctgtcccccaggctggaantgcantggccgtgatctcnantcnctgcancctgggtctcctgggtttcaagcgatttctccctgcctcanccctcccaagtanctggganctacanggtgtgtgccncctaancnccacctnaattttttgtn

SEQ ID NO: 89 - DNA, 836 bp, Homo Sapiens
gagaggtcgcatcaccatcaccatcacggatcctatttaggtgacactatagaatcgtcgacccacgcgtccgcccacgcgtccgctgacattcaggtttcagcagctgccgctaggcctaagtcagcctttaaagtccagaatgccaccacaaaaggcccaaatggtgtctatgatttctctcaggctcataatgccaaggatgtgcccaacacgcagcccaaggcagcctttaagtcccaaaatgctaccccaaagggtccaaatgctgcctatgatttttcccaggcagcaaccactggtgagttagctgctaacaagtctgagatggccttcaaggcccagaatgccactactaaagtgggcccaaatgccacctacaatttctctcagtctctcaatgccaatgacctggccaacagcaggcctaagacccctttcaaggcttggaatgataccactaaggccccaacagctgatacccagacccagaatgtaaatcaggccaaaatggccacttcccaggctgacatagagaccgacccaggtatctctgaacctgacggtgcaactgcacagacatcagcagatggttcccaggctcagaatctggagtcccggacaataattcggggcaagaggacccgcaagattaataacttgaatgttgaagagaacagcagtggggatcagaggcgggccccactggctgcagggacctggaggtctgcaccagttccagtgaccactcagaacccacctggcgcaccccccaatgtgctctggcagacgccattggcttggcagaacccctcaggctggcaaaaccagacagc

SEQ ID NO: 90 - DNA, 525 bp, Homo Sapiens
ggatcgcatcaccatcaccatcacggatcctatttaggtgacactatagaatcgtcgacccacgcgtccgcccacgcgtccgcccacgcgtccggggccgggcccgagcggatcgcgggctcgggctgcggggctccggctgcgggcgctgggccgcgaggcgcggagcttgggagcggagcccaggccgtgccgcgcggcgccatgaagggcaaggaggagaaggagggcggcgcacggctgggcgctggcggcggaagccccgagaagagcccgagcgcgcaggagctcaaggagcagggcaatcgtctgttcgtgggccgaaagtacccggaggcggcggcctgctacggccgcgcgatcgtgagtgcgcccgcgcggggagggcggcggcggtggcaccggggagggccgggcccgggcccggccggccccaccgagggtctggctcctcttcggggcgtgtcctcggctcccaaagcccagccgtggttctcgagcccagcgccgggtgccggagaacga

SEQ ID NO: 91 - DNA, 1200 bp, Homo Sapiens
  misc_feature (730)..(730): n is a, c, g, or t
  misc_feature (834)..(834): n is a, c, g, or t
  misc_feature (865)..(865): n is a, c, g, or t
  misc_feature (870)..(870): n is a, c, g, or t
  misc_feature (872)..(872): n is a, c, g, or t
  misc_feature (875)..(875): n is a, c, g, or t
  misc_feature (878)..(878): n is a, c, g, or t
  misc_feature (902)..(902): n is a, c, g, or t
  misc_feature (909)..(909): n is a, c, g, or t
  misc_feature (911)..(911): n is a, c, g, or t
  misc_feature (918)..(918): n is a, c, g, or t
  misc_feature (924)..(924): n is a, c, g, or t
  misc_feature (936)..(936): n is a, c, g, or t
  misc_feature (939)..(939): n is a, c, g, or t
  misc_feature (942)..(942): n is a, c, g, or t
  misc_feature (948)..(948): n is a, c, g, or t
  misc_feature (954)..(954): n is a, c, g, or t
  misc_feature (957)..(957): n is a, c, g, or t
  misc_feature (962)..(962): n is a, c, g, or t
  misc_feature (967)..(967): n is a, c, g, or t
  misc_feature (969)..(969): n is a, c, g, or t
  misc_feature (971)..(971): n is a, c, g, or t
  misc_feature (976)..(976): n is a, c, g, or t
  misc_feature (980)..(980): n is a, c, g, or t
  misc_feature (987)..(987): n is a, c, g, or t
  misc_feature (992)..(992): n is a, c, g, or t
  misc_feature (999)..(999): n is a, c, g, or t
  misc_feature (1001)..(1001): n is a, c, g, or t
  misc_feature (1006)..(1006): n is a, c, g, or t
  misc_feature (1014)..(1014): n is a, c, g, or t
  misc_feature (1016)..(1016): n is a, c, g, or t
  misc_feature (1022)..(1022): n is a, c, g, or t
  misc_feature (1027)..(1027): n is a, c, g, or t
  misc_feature (1035)..(1035): n is a, c, g, or t
  misc_feature (1037)..(1037): n is a, c, g, or t
  misc_feature (1045)..(1045): n is a, c, g, or t
  misc_feature (1050)..(1050): n is a, c, g, or t
  misc_feature (1054)..(1054): n is a, c, g, or t
  misc_feature (1061)..(1062): n is a, c, g, or t
  misc_feature (1066)..(1066): n is a, c, g, or t
  misc_feature (1076)..(1076): n is a, c, g, or t
  misc_feature (1078)..(1078): n is a, c, g, or t
  misc_feature (1080)..(1080): n is a, c, g, or t
  misc_feature (1083)..(1083): n is a, c, g, or t
  misc_feature (1088)..(1088): n is a, c, g, or t
  misc_feature (1098)..(1098): n is a, c, g, or t
  misc_feature (1100)..(1101): n is a, c, g, or t
  misc_feature (1116)..(1118): n is a, c, g, or t
  misc_feature (1121)..(1121): n is a, c, g, or t
  misc_feature (1123)..(1123): n is a, c, g, or t
  misc_feature (1127)..(1127): n is a, c, g, or t
  misc_feature (1138)..(1138): n is a, c, g, or t
  misc_feature (1146)..(1146): n is a, c, g, or t
  misc_feature (1154)..(1154): n is a, c, g, or t
  misc_feature (1158)..(1158): n is a, c, g, or t
  misc_feature (1163)..(1163): n is a, c, g, or t
  misc_feature (1170)..(1170): n is a, c, g, or t
  misc_feature (1178)..(1179): n is a, c, g, or t
  misc_feature (1181)..(1181): n is a, c, g, or t
  misc_feature (1184)..(1184): n is a, c, g, or t
  misc_feature (1189)..(1190): n is a, c, g, or t
  misc_feature (1196)..(1198): n is a, c, g, or t
  misc_feature (1200)..(1200): n is a, c, g, or t
agagaaattactatgagaggatcgcatcaccatcaccatcacggatcctatttaggtgacactatagaatcgtcgacccacgcgtccgggaagaaggaaggggcgaacggcgtgagctggcgccgaaatgggagaaagcagcgagtgagaggggaaggggcgccaggcgagcacccgggagccagcgggacctgggcaggggcgcccggagcaggcgcgcatggcgggccccgcgcggggatccggctggaagagagcgtagcacggctcgcacgagtccggggccgatgtaccaggtgagcggccagcgcccctctggctgcgacgcgccctatggagcccccagcgcagccccgggcccagcccagaccctatccctccttcctgggctggaggtagtaacaggatccactcaccctgcggaggcagcaccagaggagggctccctggaggaggcggcaacccccatgccccaaggcaatggccctggcatcccccagggcctggacagcactgacctcgacgtccccacagaagctgtgacatgccagcctcaggggaaccccttgggctgcaccccacttctgccgaatgactctggccacccctcagagctgggcggcaccagacgggcggggaatggtgccctgggtggccccaaggcccaccggaagttgcagacacacccatctctcgccagccagggcagcaagaagagtaagagcagcancaaatccaccacctcccagatccccctccaggcacaggaagactgctgtgtccactgcatcctgtcctgcctgttctgcgagttcctgacgctgtgcaacatcntcctggactgcgccacctgtggctcctgcanctcgnangantcntgcctctgctgctgctgctgtggntctggcnantgtgccnactgcnacctgccctgcnacntgnactgcngcatcntgnatgcntgctncnantcccngaantgcttgnaaatntgcatgnantgctnttgggctntncttttncctcntgaacctntnttcggggnttaanccancctgggnncccntgcaaattcnananggntcctnttaatggggncnngccccaaaattttcnnnaangntttnaaaaccccctnttcctggntctttttnaccnccctnttttttnaaaacccnncnttnaaaanngggggnnntn

SEQ ID NO: 92 - DNA, 1200 bp, Homo Sapiens
  misc_feature (850)..(850): n is a, c, g, or t
  misc_feature (867)..(867): n is a, c, g, or t
  misc_feature (892)..(892): n is a, c, g, or t
  misc_feature (899)..(899): n is a, c, g, or t
  misc_feature (911)..(912): n is a, c, g, or t
  misc_feature (915)..(915): n is a, c, g, or t
  misc_feature (919)..(919): n is a, c, g, or t
  misc_feature (932)..(932): n is a, c, g, or t
  misc_feature (934)..(934): n is a, c, g, or t
  misc_feature (948)..(948): n is a, c, g, or t
  misc_feature (956)..(956): n is a, c, g, or t
  misc_feature (975)..(975): n is a, c, g, or t
  misc_feature (980)..(980): n is a, c, g, or t
  misc_feature (989)..(989): n is a, c, g, or t
  misc_feature (1001)..(1001): n is a, c, g, or t
  misc_feature (1016)..(1016): n is a, c, g, or t
  misc_feature (1019)..(1019): n is a, c, g, or t
  misc_feature (1029)..(1029): n is a, c, g, or t
  misc_feature (1033)..(1033): n is a, c, g, or t
  misc_feature (1045)..(1045): n is a, c, g, or t
  misc_feature (1050)..(1050): n is a, c, g, or t
  misc_feature (1053)..(1055): n is a, c, g, or t
  misc_feature (1060)..(1061): n is a, c, g, or t
  misc_feature (1066)..(1066): n is a, c, g, or t
  misc_feature (1071)..(1071): n is a, c, g, or t
  misc_feature (1079)..(1079): n is a, c, g, or t
  misc_feature (1081)..(1082): n is a, c, g, or t
  misc_feature (1088)..(1092): n is a, c, g, or t
  misc_feature (1094)..(1094): n is a, c, g, or t
  misc_feature (1096)..(1097): n is a, c, g, or t
  misc_feature (1102)..(1104): n is a, c, g, or t
  misc_feature (1107)..(1107): n is a, c, g, or t
  misc_feature (1116)..(1116): n is a, c, g, or t
  misc_feature (1118)..(1119): n is a, c, g, or t
  misc_feature (1124)..(1124): n is a, c, g, or t
  misc_feature (1126)..(1126): n is a, c, g, or t
  misc_feature (1128)..(1128): n is a, c, g, or t
  misc_feature (1133)..(1133): n is a, c, g, or t
  misc_feature (1143)..(1143): n is a, c, g, or t
  misc_feature (1145)..(1147): n is a, c, g, or t
  misc_feature (1149)..(1150): n is a, c, g, or t
  misc_feature (1157)..(1160): n is a, c, g, or t
  misc_feature (1166)..(1168): n is a, c, g, or t
  misc_feature (1170)..(1173): n is a, c, g, or t
  misc_feature (1176)..(1176): n is a, c, g, or t
  misc_feature (1178)..(1178): n is a, c, g, or t
  misc_feature (1186)..(1186): n is a, c, g, or t
  misc_feature (1188)..(1188): n is a, c, g, or t
  misc_feature (1194)..(1195): n is a, c, g, or t
tagagagaattactatgagaggatcgcatcaccatcaccatcacggatcctatttaggtgacactatagaatcgtcgacccacgcgtccgggtcggaaaaaagggagaagaaaccggcaccctctctgagaggcaacagaagcagcaattgtttcagcgaaaaaagcagcaagggagggagtgaaggaaaaaagcaaaaaagggggcgacacgcaagtgcctgtaggggtgaaaggagcagggaccggcgatctagggggggatcagctacaaaagaaactgtcactgggagcggtgcggccaaggaggaagcagtgctgccaggctctgctccagggcacagctggctggcggctgccctgtccgcagcaaaggggcacaggccggggaccgcgagaggtggcaaagtggcaccgggcgccgaggctgctgagcgctcgccgagacggcgaccggactggctgccccggaactgcggcgactctccctactcagaacttggcctacgtttcccaggactctccccatctccagaggcccccacaaaaccgggaaaggaaggaaaggacagcggcggcagcagctcaatgagtgcctacagcagaaagcctgaacgagctcggtcgtaggcgggaagttcccgggggggctgcccagtgcagccgcaatgctgccgcgagctgccccagcagtccgggctccgtagacgctttccgcatcactctccttcctcgggctgccgggagtcccgggacctggcggggccggcatgacgggcttctcgggggcccgccgcacgcccggcagcctccggagacgcgcgccgagcccggctcccacggcctctgangctcggcgggggctgcngctgcctggcgggcgggctccgganctttctngagcggcattannccncggnttggccccggacncnaccaaaggctcttntggaaaancccaaaacactgggcatcnttacnacctgtaanttgaggccaccnaattgctactcccgntcnccttttggcnattntttttttaaccntccgnaannnttcannatccnacccnccgggggntnntcccannnnngnannacccnnnaantttcctttngnnaaaangnangaaanccaacccctngnnnanntgccctnnnnttttcnnncnnnnttnantccccccngnaaaggnncctaa

SEQ ID NO: 93 - DNA, 1431 bp, Homo Sapiens
  misc_feature (5)..(5): n is a, c, g, or t
  misc_feature (829)..(829): n is a, c, g, or t
  misc_feature (845)..(845): n is a, c, g, or t
  misc_feature (905)..(905): n is a, c, g, or t
  misc_feature (943)..(943): n is a, c, g, or t
  misc_feature (969)..(969): n is a, c, g, or t
  misc_feature (971)..(971): n is a, c, g, or t
  misc_feature (974)..(974): n is a, c, g, or t
  misc_feature (994)..(994): n is a, c, g, or t
  misc_feature (996)..(996): n is a, c, g, or t
  misc_feature (1008)..(1009): n is a, c, g, or t
  misc_feature (1017)..(1017): n is a, c, g, or t
  misc_feature (1022)..(1022): n is a, c, g, or t
  misc_feature (1026)..(1027): n is a, c, g, or t
  misc_feature (1031)..(1031): n is a, c, g, or t
  misc_feature (1043)..(1043): n is a, c, g, or t
  misc_feature (1049)..(1050): n is a, c, g, or t
  misc_feature (1070)..(1070): n is a, c, g, or t
  misc_feature (1073)..(1073): n is a, c, g, or t
  misc_feature (1076)..(1076): n is a, c, g, or t
  misc_feature (1081)..(1081): n is a, c, g, or t
  misc_feature (1085)..(1085): n is a, c, g, or t
  misc_feature (1098)..(1098): n is a, c, g, or t
  misc_feature (1107)..(1107): n is a, c, g, or t
  misc_feature (1122)..(1122): n is a, c, g, or t
  misc_feature (1127)..(1127): n is a, c, g, or t
  misc_feature (1129)..(1129): n is a, c, g, or t
  misc_feature (1132)..(1132): n is a, c, g, or t
  misc_feature (1134)..(1137): n is a, c, g, or t
  misc_feature (1147)..(1147): n is a, c, g, or t
  misc_feature (1160)..(1160): n is a, c, g, or t
  misc_feature (1166)..(1166): n is a, c, g, or t
  misc_feature (1170)..(1170): n is a, c, g, or t
  misc_feature (1177)..(1179): n is a, c, g, or t
  misc_feature (1193)..(1193): n is a, c, g, or t
  misc_feature (1201)..(1201): n is a, c, g, or t
  misc_feature (1203)..(1203): n is a, c, g, or t
  misc_feature (1213)..(1213): n is a, c, g, or t
  misc_feature (1220)..(1220): n is a, c, g, or t
  misc_feature (1225)..(1226): n is a, c, g, or t
  misc_feature (1240)..(1240): n is a, c, g, or t
  misc_feature (1248)..(1249): n is a, c, g, or t
  misc_feature (1251)..(1251): n is a, c, g, or t
  misc_feature (1255)..(1255): n is a, c, g, or t
  misc_feature (1257)..(1257): n is a, c, g, or t
  misc_feature (1267)..(1267): n is a, c, g, or t
  misc_feature (1271)..(1271): n is a, c, g, or t
  misc_feature (1285)..(1286): n is a, c, g, or t
  misc_feature (1296)..(1296): n is a, c, g, or t
  misc_feature (1305)..(1305): n is a, c, g, or t
  misc_feature (1311)..(1311): n is a, c, g, or t
  misc_feature (1316)..(1316): n is a, c, g, or t
  misc_feature (1321)..(1321): n is a, c, g, or t
  misc_feature (1334)..(1335): n is a, c, g, or t
  misc_feature (1337)..(1337): n is a, c, g, or t
  misc_feature (1350)..(1350): n is a, c, g, or t
  misc_feature (1373)..(1374): n is a, c, g, or t
  misc_feature (1384)..(1385): n is a, c, g, or t
  misc_feature (1387)..(1387): n is a, c, g, or t
  misc_feature (1392)..(1393): n is a, c, g, or t
  misc_feature (1399)..(1402): n is a, c, g, or t
  misc_feature (1409)..(1409): n is a, c, g, or t
  misc_feature (1411)..(1411): n is a, c, g, or t
  misc_feature (1417)..(1417): n is a, c, g, or t
  misc_feature (1421)..(1423): n is a, c, g, or t
agagnaattactatgagaggatcgcatcaccatcaccatcacggatcctatttaggtgacactatagaatcgtcgacccacgcgtccgcgagagcaaacccagtgactcacctccgccgtgctaactcctcgctagctctccctctcacacacgctcacacccggctcgagatggcggcggcggcggcggcggcgggggactcggactcctgggacgccgacgctttctccgtggaagacccagtgcggaaggtggggggcggcggcactgccggcggggaccgctgggaaggcgaggacgaggacgaggacgtcaaggataactgggatgacgatgatgatgaaaaaaaagaggaagcagaagtaaaaccagaggtaaaaatttcagaaaagaaaaaaatagcagagaagataaaagagaaagaacggcaacagaagaaaaggcaagaagaaattaaaaagaggttagaagaacccgaagaacctaaagtgctaacaccagaagaacaattagcagataaactgcggctaaagaaattacaggaagagtcagacctcgaattagcaaaggaaacttttggtgttaataatgcagtttatggaatagatgctatgaacccatcttcaagagatgactttacagagtttggaaagttactaaaagataaaattacacaatatgaaaagtcactatattatgccagttttttggaagtcttagttcgagatgtgtgtatttcattggaaattgatgacttgaaaaaaattaccaattcactgactgtgctttgcagtgaaaaacagaagcaagaaaagcaaagcaaagccnaaaagaagaagaaagntgtggttcctggagggggattaaaagccaccatgaaagatgatctggcaaattatggtgnttatgatggaggatttgtacaagactatgaagacttcntgtgacattttatcttttcttggggncntcntttatgttgcccccaatccntngaacttgtagcnnaactttcnttttntttnngttntgccaaatgctncaatcnnaagtgcagtatctttttggntgnttntttancccnttgaactttaggngcctattgnccaattgaaggaacnttggntnttntnnnnccaggggttnaaattgggaaacntaattntttntaatctnnnttcaaacccaaaanggtggccntnttgctttcgnttttaanccccnntccttattttgaancaaaggtnncncggncnaaaaaatttngttnttttcccccctttnnaaaacccttnaccaccccnttgaanttttnaattntaaaaaaattttnncnggggggggggccnaattaaaattttttttttttttnnggggttaaanntnggaanntctttnnnnaaaatgngngaaccntttnnnattacccc

SEQ ID NO: 94 - DNA, 925 bp, Homo Sapiens
gaggatcgcatcaccatcaccatcacggatcctatttaggtgacactatagaatcgtcgacccacgcgtccgcgctgtgcgcggcggacgtcggaggcagcggggagcggagcggggccgccggggcctctccagggccgcagcggcagcagttgggccccccgccccggccggcggaccgaagaacgcaggaagggggccggggggacccgcccccggccggccgcagccatgaactccaacgtggagaacctacccccgcacatcatccgcctggtgtacaaggaggtgacgacactgaccgcagacccacccgatggcatcaaggtctttcccaacgaggaggacctcaccgacctccaggtcaccatcgagggccctgaggggaccccatatgctggaggtctgttccgcatgaaactcctgctggggaaggacttccctgcctccccacccaagggctacttcctgaccaagatcttccacccgaacgtgggcgccaatggcgagatctgcgtcaacgtgctcaagagggactggacggctgagctgggcatccgacacgtactgctgaccatcaagtgcctgctgatccaccctaaccccgagtctgcactcaacgaggaggcgggccgcctgctcttggagaactacgaggagtatgcagctcgggcccgtctgctcacagagatccacgggggcgccggcgggcccagcggcagggccgaagccggtcgggccctggccagtggcactgaagcttcctccaccgaccctggggccccagggggcccgggaggggctgagggtcccatggccaagaagcatgctggcgagcgcgataagaagctggcggccaagaaaaagacggacaagaagcgggcgctgcggcggctgtagtgggctctcttcctccttccaccgt

SEQ ID NO: 95 - DNA, 1303 bp, Homo Sapiens
  misc_feature (895)..(895): n is a, c, g, or t
  misc_feature (950)..(1036): n is a, c, g, or t
  misc_feature (1043)..(1043): n is a, c, g, or t
  misc_feature (1062)..(1062): n is a, c, g, or t
  misc_feature (1065)..(1066): n is a, c, g, or t
  misc_feature (1069)..(1069): n is a, c, g, or t
  misc_feature (1072)..(1073): n is a, c, g, or t
  misc_feature (1078)..(1079): n is a, c, g, or t
  misc_feature (1082)..(1085): n is a, c, g, or t
  misc_feature (1089)..(1089): n is a, c, g, or t
  misc_feature (1094)..(1094): n is a, c, g, or t
  misc_feature (1096)..(1096): n is a, c, g, or t
  misc_feature (1099)..(1099): n is a, c, g, or t
  misc_feature (1102)..(1102): n is a, c, g, or t
  misc_feature (1104)..(1105): n is a, c, g, or t
  misc_feature (1110)..(1111): n is a, c, g, or t
  misc_feature (1115)..(1116): n is a, c, g, or t
  misc_feature (1119)..(1119): n is a, c, g, or t
  misc_feature (1121)..(1122): n is a, c, g, or t
  misc_feature (1127)..(1127): n is a, c, g, or t
  misc_feature (1137)..(1139): n is a, c, g, or t
  misc_feature (1142)..(1143): n is a, c, g, or t
  misc_feature (1151)..(1151): n is a, c, g, or t
  misc_feature (1156)..(1156): n is a, c, g, or t
  misc_feature (1160)..(1160): n is a, c, g, or t
  misc_feature (1162)..(1162): n is a, c, g, or t
  misc_feature (1178)..(1178): n is a, c, g, or t
  misc_feature (1199)..(1199): n is a, c, g, or t
  misc_feature (1202)..(1202): n is a, c, g, or t
  misc_feature (1205)..(1209): n is a, c, g, or t
  misc_feature (1216)..(1216): n is a, c, g, or t
  misc_feature (1226)..(1226): n is a, c, g, or t
  misc_feature (1230)..(1235): n is a, c, g, or t
  misc_feature (1237)..(1237): n is a, c, g, or t
  misc_feature (1239)..(1241): n is a, c, g, or t
  misc_feature (1243)..(1244): n is a, c, g, or t
  misc_feature (1247)..(1247): n is a, c, g, or t
  misc_feature (1251)..(1251): n is a, c, g, or t
  misc_feature (1262)..(1263): n is a, c, g, or t
  misc_feature (1268)..(1270): n is a, c, g, or t
  misc_feature (1276)..(1278): n is a, c, g, or t
  misc_feature (1280)..(1281): n is a, c, g, or t
  misc_feature (1283)..(1286): n is a, c, g, or t
  misc_feature (1290)..(1290): n is a, c, g, or t
  misc_feature (1295)..(1297): n is a, c, g, or t
  misc_feature (1299)..(1300): n is a, c, g, or t
tagagaaattactatgagaggatcgcatcaccatcaccatcacggatcctatttaggtgacactatagaatcgtcgacccacgcgtccgcacacactggggagaagccgtatgtttgtggggtgtgtgggcgaggctttagtctcaagtcacacctcaacagacaccagaacatacactcaggagagaagcccattgtgtgcaaggactgtggccggggcttcagccagcaatccaacctcatcagacaccagaggacgcactcaggcgagaagcccatggtgtgtggggagtgcgggcgaggcttcagccagaagtcaaaccttgttgcacaccagaggacgcactcaggggagaggccgtatgtgtgccgagagtgcgggcgaggctttagccaccaggccggtctcatcaggcacaagcggaagcactcgagggagaagccctacatgtgcaggcagtgtggactgggctttggcaataagtcagctctaattacacacaagcgggctcactcggaagagaagccttgtgtgtgcagagagtgtggccaaggctttctccaaaagtcacacctcaccttacatcaaatgacacatacgggggagaagccatatgtgtgcaagacgtgtgggcggggcttcagcctcaagtctcacctcagcagacacaggaagaccacgtctgtccaccacagactgccagtgcagcccgaccctgagccgtgtgcagggcaaccttcggattccttatactctctctgaaggcaaagatggggacaaggactaagagtcagaatgttgacactttgatgaaatggagtaaagaaatgcattctgtaagtggtcaaaggacatttgactgtttactttctccacactaagtcttctccatgnttttgtggccttcggttgtaataaacttggcttctttatacatctgtaaaaaaannnnnnnnnnnnnnnnnnnnnnnnnnnnnnnnnnnnnnnnnnnnnnnnnnnnnnnnnnnnnnnnnnnnnnnnnnnnnnnnnnnnnnnggggggncccccccccaaaagggggnccnnttnaannttaannaannnnaacnttggncnccnggntnnaaaanncccnnaangnnccccnaaaacccccnnnggnntttttttnaaaancccngntttcccccccgggggntttttttttttggggaaaaanccnacnnnnntttgggnaaattttttngggnnnnnngnannntnnaangggnaaaaaaatccnngggannncccccnnntnnannnncccnggggnnncnnaaa

SEQ ID NO: 96 - DNA, 893 bp, Homo Sapiens
gaggtcgcatcaccatcaccatcacggatcctatttaggtgacactatagaatcgtcgacccacgcgtccgagcggcccggggccggggcggccagggccgctgcaggacgagaccctgggtgtggcgtccgtgccctcgcagtggagggccgtccagggcatccgcggggagacgaaaagttgccagacggccagcattgccactgccagtgcatccgcccaggccaggaatcatgtggacgcccaggtgcagacggaggcccccgtgcctgtcagcgtgcagcccccgtcccagtacgacatacccaggctcgcagcctttcttcggagagtggaggccatggtcatccgagagctgaacaagaattggcagagccacgcgtttgatggcttcgaggtgaactggaccgagcagcagcagatggtgtcttgtctgtataccctgggctacccgccagcccaagcgcagggtctgcatgtgaccagcatctcctggaactccactggctctgtggtggcctgtgcctacggccggctggaccatggggactggagcacgcttaagtccttcgtgtgtgcctggaacctggaccggcgagacctgcgtccccagcaaccgtcggccgtggtggaggtccccagcgctgtcctgtgtctggccttccaccccacgcagccctcccacgtcgcaggagggctgtacagtggtgaggtgttggtgtgggacctgagccgtcttgaggacccgctgctgtggcgcacaggcctgacggatgacacccacacagaccctgtgtcccaggtgggtgtggctgcccgagcctgggcacagccaccgcttccggtgctgagtgtggccactgacgggaaggtgctactctggcaaggcatc

SEQ ID NO: 97 - DNA, 1199 bp, Homo Sapiens
  misc_feature (788)..(788): n is a, c, g, or t
  misc_feature (793)..(793): n is a, c, g, or t
  misc_feature (812)..(812): n is a, c, g, or t
  misc_feature (859)..(859): n is a, c, g, or t
  misc_feature (871)..(871): n is a, c, g, or t
  misc_feature (880)..(880): n is a, c, g, or t
  misc_feature (931)..(931): n is a, c, g, or t
  misc_feature (951)..(951): n is a, c, g, or t
  misc_feature (969)..(969): n is a, c, g, or t
  misc_feature (983)..(983): n is a, c, g, or t
  misc_feature (992)..(992): n is a, c, g, or t
  misc_feature (1008)..(1008): n is a, c, g, or t
  misc_feature (1015)..(1015): n is a, c, g, or t
  misc_feature (1025)..(1025): n is a, c, g, or t
  misc_feature (1027)..(1028): n is a, c, g, or t
  misc_feature (1032)..(1032): n is a, c, g, or t
  misc_feature (1037)..(1037): n is a, c, g, or t
  misc_feature (1043)..(1043): n is a, c, g, or t
  misc_feature (1049)..(1049): n is a, c, g, or t
  misc_feature (1053)..(1053): n is a, c, g, or t
  misc_feature (1060)..(1060): n is a, c, g, or t
  misc_feature (1070)..(1070): n is a, c, g, or t
  misc_feature (1074)..(1074): n is a, c, g, or t
  misc_feature (1078)..(1079): n is a, c, g, or t
  misc_feature (1084)..(1084): n is a, c, g, or t
  misc_feature (1091)..(1091): n is a, c, g, or t
  misc_feature (1095)..(1095): n is a, c, g, or t
  misc_feature (1099)..(1099): n is a, c, g, or t
  misc_feature (1102)..(1102): n is a, c, g, or t
  misc_feature (1104)..(1106): n is a, c, g, or t
  misc_feature (1108)..(1108): n is a, c, g, or t
  misc_feature (1110)..(1112): n is a, c, g, or t
  misc_feature (1117)..(1117): n is a, c, g, or t
  misc_feature (1119)..(1120): n is a, c, g, or t
  misc_feature (1133)..(1133): n is a, c, g, or t
  misc_feature (1136)..(1136): n is a, c, g, or t
  misc_feature (1142)..(1142): n is a, c, g, or t
  misc_feature (1144)..(1144): n is a, c, g, or t
  misc_feature (1150)..(1150): n is a, c, g, or t
  misc_feature (1157)..(1158): n is a, c, g, or t
  misc_feature (1161)..(1164): n is a, c, g, or t
  misc_feature (1166)..(1168): n is a, c, g, or t
  misc_feature (1174)..(1174): n is a, c, g, or t
  misc_feature (1177)..(1177): n is a, c, g, or t
  misc_feature (1181)..(1182): n is a, c, g, or t
  misc_feature (1184)..(1187): n is a, c, g, or t
  misc_feature (1196)..(1196): n is a, c, g, or t
aattagagaaattactatgagaggatcgcatcaccatcaccatcacggatcctatttaggtgacactatagaatcgtcgacccacgcgtccgaggcagtcagcgaggcccaggagaaattgacagaatccaaccagaagctggggctgctgcgggaggctctggagcggagacttggggagctgcccgccgaccaccccaaggggcggctgctgcgagaagagctcgctgcggcctcctccgctgccttcagcacccgcctggccgggccctttcccgccacgcactacagcaccctgtgcaagcccgcgccgctcacagggaccctggaggtacgagtggtgggctgcagagacctcccagagaccatcccgtggaaccctaccccctcaatggggggacctgggaccccagacagccgcccccccttcctgagccgcccagcccggggcctttacagccgaagcggaagcctcagtggccggagcagcctcaaagcagaagccgagaacaccagtcaccttccgcaaccctgtcattgagaggattcctcggctccgacggcagaagaaaattttctccaagcagcaagggaaggcgttccagcgtgctaggcagatgaacatcgatgtcgccacgtgggtgcggctgctccggaggctcatccccaatgccacgggcacaggcacctttagccctggggcttctccaggatccgaggcccggaccacgggtgacatatcggtggagaagctgaacctcggcactgactcggacagctcacctcanaaganctcgcgggatcctccttcnagcccatcgagcctgagctccccatccaggaatccactgctcccganctgccttcgganacccagganacccaggccccgccctgtgcagccctctgagaaagtcacctctgaccctcnaaaattttcaagttcctggnggtgctggggccggggtnattttgggaaaggngctcctttnccaaattccggcccantgggganctgttccccntnnaggnttttnaaaaangggaantttntggcccnaaaaaagtgnaaancttnnttttnaaaaacngaanttgnggnannnancnnnggggnanncccctttctgggnaancttttngntgtttnaaaaacnnaannnntnnnttttgnagnaaanncnnnnggggggaantta

SEQ ID NO: 98 - DNA, 1407 bp, Homo Sapiens
  misc_feature (4)..(4): n is a, c, g, or t
  misc_feature (754)..(754): n is a, c, g, or t
  misc_feature (757)..(757): n is a, c, g, or t
  misc_feature (829)..(829): n is a, c, g, or t
  misc_feature (844)..(844): n is a, c, g, or t
  misc_feature (876)..(876): n is a, c, g, or t
  misc_feature (882)..(882): n is a, c, g, or t
  misc_feature (899)..(899): n is a, c, g, or t
  misc_feature (917)..(917): n is a, c, g, or t
  misc_feature (943)..(943): n is a, c, g, or t
  misc_feature (959)..(959): n is a, c, g, or t
  misc_feature (975)..(976): n is a, c, g, or t
  misc_feature (978)..(978): n is a, c, g, or t
  misc_feature (989)..(989): n is a, c, g, or t
  misc_feature (991)..(991): n is a, c, g, or t
  misc_feature (997)..(997): n is a, c, g, or t
  misc_feature (1007)..(1008): n is a, c, g, or t
  misc_feature (1021)..(1021): n is a, c, g, or t
  misc_feature (1029)..(1029): n is a, c, g, or t
  misc_feature (1031)..(1031): n is a, c, g, or t
  misc_feature (1035)..(1037): n is a, c, g, or t
  misc_feature (1040)..(1040): n is a, c, g, or t
  misc_feature (1053)..(1053): n is a, c, g, or t
  misc_feature (1062)..(1062): n is a, c, g, or t
  misc_feature (1072)..(1073): n is a, c, g, or t
  misc_feature (1084)..(1084): n is a, c, g, or t
  misc_feature (1089)..(1090): n is a, c, g, or t
  misc_feature (1097)..(1097): n is a, c, g, or t
  misc_feature (1104)..(1104): n is a, c, g, or t
  misc_feature (1113)..(1113): n is a, c, g, or t
  misc_feature (1115)..(1115): n is a, c, g, or t
  misc_feature (1126)..(1126): n is a, c, g, or t
  misc_feature (1131)..(1131): n is a, c, g, or t
  misc_feature (1135)..(1135): n is a, c, g, or t
  misc_feature (1139)..(1139): n is a, c, g, or t
  misc_feature (1143)..(1144): n is a, c, g, or t
  misc_feature (1153)..(1154): n is a, c, g, or t
  misc_feature (1156)..(1156): n is a, c, g, or t
  misc_feature (1169)..(1169): n is a, c, g, or t
  misc_feature (1184)..(1184): n is a, c, g, or t
  misc_feature (1187)..(1188): n is a, c, g, or t
  misc_feature (1191)..(1191): n is a, c, g, or t
  misc_feature (1195)..(1196): n is a, c, g, or t
  misc_feature (1201)..(1201): n is a, c, g, or t
  misc_feature (1203)..(1204): n is a, c, g, or t
  misc_feature (1207)..(1207): n is a, c, g, or t
  misc_feature (1220)..(1221): n is a, c, g, or t
  misc_feature (1228)..(1230): n is a, c, g, or t
  misc_feature (1235)..(1235): n is a, c, g, or t
  misc_feature (1248)..(1248): n is a, c, g, or t
  misc_feature (1256)..(1256): n is a, c, g, or t
  misc_feature (1263)..(1265): n is a, c, g, or t
  misc_feature (1268)..(1268): n is a, c, g, or t
  misc_feature (1274)..(1276): n is a, c, g, or t
  misc_feature (1279)..(1279): n is a, c, g, or t
  misc_feature (1281)..(1281): n is a, c, g, or t
  misc_feature (1286)..(1287): n is a, c, g, or t
  misc_feature (1294)..(1297): n is a, c, g, or t
  misc_feature (1303)..(1303): n is a, c, g, or t
  misc_feature (1305)..(1307): n is a, c, g, or t
  misc_feature (1310)..(1310): n is a, c, g, or t
  misc_feature (1315)..(1315): n is a, c, g, or t
  misc_feature (1319)..(1319): n is a, c, g, or t
  misc_feature (1324)..(1325): n is a, c, g, or t
  misc_feature (1329)..(1329): n is a, c, g, or t
  misc_feature (1331)..(1332): n is a, c, g, or t
  misc_feature (1334)..(1335): n is a, c, g, or t
  misc_feature (1337)..(1338): n is a, c, g, or t
  misc_feature (1344)..(1344): n is a, c, g, or t
  misc_feature (1348)..(1348): n is a, c, g, or t
  misc_feature (1357)..(1358): n is a, c, g, or t
  misc_feature (1360)..(1360): n is a, c, g, or t
  misc_feature (1367)..(1367): n is a, c, g, or t
  misc_feature (1369)..(1370): n is a, c, g, or t
  misc_feature (1378)..(1378): n is a, c, g, or t
  misc_feature (1380)..(1380): n is a, c, g, or t
  misc_feature (1386)..(1386): n is a, c, g, or t
  misc_feature (1390)..(1390): n is a, c, g, or t
  misc_feature (1393)..(1393): n is a, c, g, or t
  misc_feature (1400)..(1400): n is a, c, g, or t
  misc_feature (1402)..(1403): n is a, c, g, or t
  misc_feature (1405)..(1405): n is a, c, g, or t
  misc_feature (1407)..(1407): n is a, c, g, or t
aganaattactatgagaggatcgcatcaccatcaccatcacggatcctatttaggtgacactatagaatcgtcgacccacgcgtccggcgggcagggtgctgacggctgggccacacgctgtctcattgtctctgcagtccgctgcccggcccggaagcggaggaactcacgggatggggacccgctgccctccagcctcagctgcaaggtgcacgtggcatcggtgaacaacttccccacggctgcgggcctggcctcctcagcggcgggctatgcctgcctaggtaccttttgttgcccttgtcgcaggccgcaacctctgcaggccgtgaacagagagtgtccgagagtggaactagcggaggtgggggacagacggctgggccggtgaatgctggcctcaaaggctgatggcccagaagccctgtcatctggaaatccccatttgccgtggggtgtgggacgttcctggggcggtgagctgtcagggagcacagcgcaggcagctctgaggaccctccctgaatccgcatgcctgcagcctacaccctggcccgtgtctacggcgtggagagtgacctctcagaagtggctcgccggggctcaggcagcgcctgccggagcctgtatgggggctttgtggagtggcagatgggagagcaggccgacgggaaggacagcatcgctcggcaagtggcccccgagtcacactggcctgaactccgcgtgctcatccttgtggtgagcgctganaanaagctgacaggcagtaccgtgggcatgcgggccagtgtggagaccagccccctgcttcggttccgggccgantccgtggtgcccgcncgcatggcggaaaatggccccctgcatccggnaacganacttcccccaactttcncccagcttgaccatgaangaacagcaaccagtttccacgccacntgccctcgaaaccttncccgcccatctcttanntnaatgccaattntnctgggngcatcatccnncttggtgcaaccnctttcaancncccnnncanggggaaaaccaanggggcgtanaccttttaanncgggcccccanggccnnaattttncccctgnaaaaaactntngctaaattttngctcnttgntggnaagnnttttccccnngntcaaaggaaaaanttttttaaggcctcnatnnaancccnnccctntnnaantaaatttaagttnncttggcnnngaacnaaaccccgggggnccaaaaanttatttnnncangggggnnnggncnaaatnnaaaaacnnnncccccntnnnttntaaanttgnaaaannattntnntnntnnaaaaancttncctttaaanngngcccccnannaaaaaaanangggggncacntcnaaatagngnntntn

SEQ ID NO: 99 - DNA, 1363 bp, Homo Sapiens
  misc_feature (743)..(743): n is a, c, g, or t
  misc_feature (755)..(756): n is a, c, g, or t
  misc_feature (758)..(758): n is a, c, g, or t
  misc_feature (769)..(769): n is a, c, g, or t
  misc_feature (776)..(776): n is a, c, g, or t
  misc_feature (791)..(791): n is a, c, g, or t
  misc_feature (796)..(797): n is a, c, g, or t
  misc_feature (805)..(805): n is a, c, g, or t
  misc_feature (814)..(814): n is a, c, g, or t
  misc_feature (823)..(823): n is a, c, g, or t
  misc_feature (827)..(827): n is a, c, g, or t
  misc_feature (831)..(831): n is a, c, g, or t
  misc_feature (840)..(840): n is a, c, g, or t
  misc_feature (844)..(844): n is a, c, g, or t
  misc_feature (852)..(853): n is a, c, g, or t
  misc_feature (856)..(856): n is a, c, g, or t
  misc_feature (865)..(865): n is a, c, g, or t
  misc_feature (868)..(868): n is a, c, g, or t
  misc_feature (871)..(872): n is a, c, g, or t
  misc_feature (874)..(874): n is a, c, g, or t
  misc_feature (878)..(879): n is a, c, g, or t
  misc_feature (882)..(884): n is a, c, g, or t
  misc_feature (887)..(887): n is a, c, g, or t
  misc_feature (889)..(890): n is a, c, g, or t
  misc_feature (894)..(894): n is a, c, g, or t
  misc_feature (899)..(899): n is a, c, g, or t
  misc_feature (908)..(908): n is a, c, g, or t
  misc_feature (912)..(912): n is a, c, g, or t
  misc_feature (919)..(919): n is a, c, g, or t
  misc_feature (924)..(924): n is a, c, g, or t
  misc_feature (929)..(930): n is a, c, g, or t
  misc_feature (932)..(934): n is a, c, g, or t
  misc_feature (936)..(936): n is a, c, g, or t
  misc_feature (939)..(939): n is a, c, g, or t
  misc_feature (946)..(946): n is a, c, g, or t
  misc_feature (948)..(950): n is a, c, g, or t
  misc_feature (955)..(960): n is a, c, g, or t
  misc_feature (965)..(965): n is a, c, g, or t
  misc_feature (969)..(969): n is a, c, g, or t
  misc_feature (972)..(973): n is a, c, g, or t
  misc_feature (976)..(978): n is a, c, g, or t
  misc_feature (980)..(980): n is a, c, g, or t
  misc_feature (983)..(984): n is a, c, g, or t
  misc_feature (986)..(992): n is a, c, g, or t
  misc_feature (995)..(995): n is a, c, g, or t
  misc_feature (1000)..(1000): n is a, c, g, or t
  misc_feature (1004)..(1005): n is a, c, g, or t
  misc_feature (1009)..(1013): n is a, c, g, or t
  misc_feature (1018)..(1021): n is a, c, g, or t
  misc_feature (1023)..(1024): n is a, c, g, or t
  misc_feature (1026)..(1027): n is a, c, g, or t
  misc_feature (1029)..(1032): n is a, c, g, or t
  misc_feature (1037)..(1041): n is a, c, g, or t
  misc_feature (1045)..(1045): n is a, c, g, or t
  misc_feature (1047)..(1049): n is a, c, g, or t
  misc_feature (1052)..(1056): n is a, c, g, or t
  misc_feature (1058)..(1060): n is a, c, g, or t
  misc_feature (1062)..(1063): n is a, c, g, or t
  misc_feature (1065)..(1065): n is a, c, g, or t
  misc_feature (1068)..(1068): n is a, c, g, or t
  misc_feature (1071)..(1071): n is a, c, g, or t
  misc_feature (1074)..(1074): n is a, c, g, or t
  misc_feature (1077)..(1078): n is a, c, g, or t
  misc_feature (1080)..(1083): n is a, c, g, or t
  misc_feature (1085)..(1085): n is a, c, g, or t
  misc_feature (1088)..(1089): n is a, c, g, or t
  misc_feature (1091)..(1094): n is a, c, g, or t
  misc_feature (1096)..(1102): n is a, c, g, or t
  misc_feature (1104)..(1115): n is a, c, g, or t
  misc_feature (1118)..(1120): n is a, c, g, or t
  misc_feature (1122)..(1124): n is a, c, g, or t
  misc_feature (1128)..(1131): n is a, c, g, or t
  misc_feature (1134)..(1140): n is a, c, g, or t
  misc_feature (1143)..(1143): n is a, c, g, or t
  misc_feature (1145)..(1145): n is a, c, g, or t
  misc_feature (1148)..(1149): n is a, c, g, or t
  misc_feature (1151)..(1163): n is a, c, g, or t
  misc_feature (1165)..(1168): n is a, c, g, or t
  misc_feature (1170)..(1170): n is a, c, g, or t
  misc_feature (1174)..(1179): n is a, c, g, or t
  misc_feature (1181)..(1181): n is a, c, g, or t
  misc_feature (1183)..(1191): n is a, c, g, or t
  misc_feature (1193)..(1211): n is a, c, g, or t
  misc_feature (1213)..(1219): n is a, c, g, or t
  misc_feature (1222)..(1225): n is a, c, g, or t
  misc_feature (1227)..(1234): n is a, c, g, or t
  misc_feature (1236)..(1237): n is a, c, g, or t
  misc_feature (1239)..(1242): n is a, c, g, or t
  misc_feature (1245)..(1246): n is a, c, g, or t
  misc_feature (1248)..(1256): n is a, c, g, or t
  misc_feature (1260)..(1263): n is a, c, g, or t
  misc_feature (1265)..(1267): n is a, c, g, or t
  misc_feature (1269)..(1278): n is a, c, g, or t
  misc_feature (1280)..(1281): n is a, c, g, or t
  misc_feature (1283)..(1288): n is a, c, g, or t
  misc_feature (1290)..(1308): n is a, c, g, or t
  misc_feature (1310)..(1328): n is a, c, g, or t
  misc_feature (1330)..(1336): n is a, c, g, or t
  misc_feature (1338)..(1339): n is a, c, g, or t
  misc_feature (1341)..(1343): n is a, c, g, or t
  misc_feature (1345)..(1347): n is a, c, g, or t
  misc_feature (1349)..(1354): n is a, c, g, or t
  misc_feature (1356)..(1362): n is a, c, g, or t
cccatcacggatcctatttaggtgacactatagaatcgtcgacccacgcgtccggctctcagctggctcttgtctcgcccttttgttttatttcggaggcttgcagtttagggcatcgaggagccacagccggagagaagaacacagcggtaggaatggcttgcaccaccccagtccggatcatttctggccccgcttcccggacgctctgcgccccttcgttccttgggatcaattggaaaacgaggattccagcgtgcacatttccccccggcagaagcgagatgccaactccagcatctacaaaggcaagaagtgccgcatggagtcctgcttcgatttcaccctttgcaagaaaaacggcttcaaagtctacgtatacccacagcaaaaaggggagaaaatcgccgaaagttaccaaaacattctagcggccatcgagggctccaggttctacacctcggaccccagccaggcgtgcctctttgtcctgagtctggatactttagacagagaccagttgtcacctcagtatgtgcacaatttgagatccaaagtgcagagtctccacttgtggaacaatggtaggaatcatttaatttttaatttatattccggcacttggcctgactacaccgaggacgtggggtttgacatcggccaggcgatgctggccaaagccagcatcagtactgaaaaacttccgacccaactttgatgtttctattcccctcttttctaangatcatccccannanaggaagggganagggggntttttgaagttcaanaccannccttcctntcaggaaanaacatgctnggtnttcnaggggaaanaagntacttgannggnaaaggatcnaanccnngnatgnnttnnnttncnntccnttaanggggaagangttntgctccnccccncctgnnannnanggnaaaaatngnnnaaaannnnnngattncttnctnngannnanaannannnnnnnttntaaantatnntttnnnnnaaatnnnnannanngnnnnttttnnnnngttncnnnggnnnnnannntnngnctntanaantcnngnnnntnttnngnnnncnnnnnnncnnnnnnnnnnnnaannngnnnaatnnnnttnnnnnnnatnanttnnannnnnnnnnnnnnannnnanaaannnnnnanannnnnnnnntnnnnnnnnnnnnnnnnnnnannnnnnntannnnannnnnnnngnngnnnnttnntnnnnnnnnntatnnnnannntnnnnnnnnnnanntnnnnnntnnnnnnnnnnnnnnnnnnnannnnnnnnnnnnnnnnnnntnnnnnnnanntnnntnnnannnnnnannnnnnna

SEQ ID NO: 100 - DNA, 1400 bp, Homo Sapiens
  misc_feature (770)..(770): n is a, c, g, or t
  misc_feature (861)..(861): n is a, c, g, or t
  misc_feature (864)..(864): n is a, c, g, or t
  misc_feature (870)..(870): n is a, c, g, or t
  misc_feature (918)..(918): n is a, c, g, or t
  misc_feature (966)..(966): n is a, c, g, or t
  misc_feature (981)..(981): n is a, c, g, or t
  misc_feature (991)..(991): n is a, c, g, or t
  misc_feature (1012)..(1012): n is a, c, g, or t
  misc_feature (1021)..(1021): n is a, c, g, or t
  misc_feature (1038)..(1038): n is a, c, g, or t
  misc_feature (1046)..(1046): n is a, c, g, or t
  misc_feature (1048)..(1048): n is a, c, g, or t
  misc_feature (1054)..(1054): n is a, c, g, or t
  misc_feature (1063)..(1063): n is a, c, g, or t
  misc_feature (1068)..(1068): n is a, c, g, or t
  misc_feature (1093)..(1093): n is a, c, g, or t
  misc_feature (1095)..(1095): n is a, c, g, or t
  misc_feature (1098)..(1098): n is a, c, g, or t
  misc_feature (1105)..(1105): n is a, c, g, or t
  misc_feature (1113)..(1113): n is a, c, g, or t
  misc_feature (1124)..(1124): n is a, c, g, or t
  misc_feature (1127)..(1127): n is a, c, g, or t
  misc_feature (1134)..(1134): n is a, c, g, or t
  misc_feature (1136)..(1136): n is a, c, g, or t
  misc_feature (1143)..(1143): n is a, c, g, or t
  misc_feature (1146)..(1146): n is a, c, g, or t
  misc_feature (1150)..(1150): n is a, c, g, or t
  misc_feature (1152)..(1152): n is a, c, g, or t
  misc_feature (1158)..(1158): n is a, c, g, or t
  misc_feature (1171)..(1171): n is a, c, g, or t
  misc_feature (1173)..(1173): n is a, c, g, or t
  misc_feature (1176)..(1177): n is a, c, g, or t
  misc_feature (1184)..(1184): n is a, c, g, or t
  misc_feature (1189)..(1189): n is a, c, g, or t
  misc_feature (1192)..(1192): n is a, c, g, or t
  misc_feature (1204)..(1205): n is a, c, g, or t
  misc_feature (1212)..(1212): n is a, c, g, or t
  misc_feature (1216)..(1216): n is a, c, g, or t
  misc_feature (1219)..(1219): n is a, c, g, or t
  misc_feature (1227)..(1227): n is a, c, g, or t
  misc_feature (1231)..(1231): n is a, c, g, or t
  misc_feature (1237)..(1237): n is a, c, g, or t
  misc_feature (1239)..(1240): n is a, c, g, or t
  misc_feature (1243)..(1243): n is a, c, g, or t
  misc_feature (1257)..(1257): n is a, c, g, or t
  misc_feature (1260)..(1260): n is a, c, g, or t
  misc_feature (1268)..(1268): n is a, c, g, or t
  misc_feature (1275)..(1275): n is a, c, g, or t
  misc_feature (1277)..(1278): n is a, c, g, or t
  misc_feature (1280)..(1283): n is a, c, g, or t
  misc_feature (1292)..(1292): n is a, c, g, or t
  misc_feature (1303)..(1303): n is a, c, g, or t
  misc_feature (1306)..(1306): n is a, c, g, or t
  misc_feature (1308)..(1308): n is a, c, g, or t
  misc_feature (1314)..(1315): n is a, c, g, or t
  misc_feature (1321)..(1321): n is a, c, g, or t
  misc_feature (1324)..(1324): n is a, c, g, or t
  misc_feature (1326)..(1326): n is a, c, g, or t
  misc_feature (1330)..(1330): n is a, c, g, or t
  misc_feature (1340)..(1340): n is a, c, g, or t
  misc_feature (1351)..(1351): n is a, c, g, or t
  misc_feature (1354)..(1354): n is a, c, g, or t
  misc_feature (1358)..(1358): n is a, c, g, or t
  misc_feature (1360)..(1360): n is a, c, g, or t
  misc_feature (1362)..(1362): n is a, c, g, or t
  misc_feature (1365)..(1365): n is a, c, g, or t
  misc_feature (1368)..(1368): n is a, c, g, or t
  misc_feature (1372)..(1372): n is a, c, g, or t
  misc_feature (1375)..(1377): n is a, c, g, or t
  misc_feature (1384)..(1385): n is a, c, g, or t
  misc_feature (1388)..(1388): n is a, c, g, or t
  misc_feature (1391)..(1391): n is a, c, g, or t
  misc_feature (1393)..(1393): n is a, c, g, or t
  misc_feature (1398)..(1398): n is a, c, g, or t
  misc_feature (1400)..(1400): n is a, c, g, or t
tagagaaattactatgagaggatcgcatcaccatcaccatcacggatcctatttaggtgacactatagaatcgtcgacccacgcgtccgcccacgcgtccgattctggagaagccggtggacaagcaggacgcctacaggatgctgtcccggttgagtgggagagaacacagcgtgttcacaggtgtcgcgatcgtccactgctccagcaaagaccatcagctggacaccagggtctcggaattctacgaggaaacgaaggtgaagttctcggagctgtccgaggagctgctctgggaatacgtccacagcggggagcccatggacaaagctggcggctacgggatccaggccctgggcggcatgctggtggagtccgtacacggggactttctgaacgtggtgggattcccgctgaaccacttctgcaagcagctggtgaagctctactacccgccccgcccggaggacctgcggcggagtgtcaagcacgactccatcccggccgcggacaccttcgaagacctcagtgacgtggaggggggtggctcggagcccactcagagggacgcgggcagccgcgatgagaaggccgaggcgggagaggcgggacaggccacggcagaggctgagtgtcacaggactcgggagaccctgcctccgttcccgacacgcctcctggagctgattgagggctttatgctatccaagggcctgctcaccgcttgcaaactgaaggtgttcgatttgttaaaagatgaagcaccccanaaggctgcggatattgccagcaaagtggacgcctctgcgtgtggaatggaaaaggcttctggacatctgtgctgccatggggctcctgganaanacagancaaggttacagtaacacagagacagcgaacgtctacctggcatcggantggcgaatactctctgcacggcttcatcatgcacaaaaatgacctcanatggaacctctttanatacctggantttgccatccgaaaaggaaanaaaccaccnccccagggcgtttgggnaaaaaagngnaaaatntttttcaanaatgnttactaacaaaaccccggaaaaccngnctnaagtttnatgcgggnccatgcccggnatnaaaaaantnaattgcnttnccangnggccanggcctttaatttntnccnnttttccnccccntgnaaatgggaggcnncccgggngccntgncccaaaanttgncccggnannacncccaaagcggggantgnttttaacncccaaantnntnnnngggcccccntttacccccgnaangngggggnnaattcnttncngggnattttttganccccccccccnaantatntntnggnaantttnggnnnaaaaaannaanttntnggggncn

SEQ ID NO: 101 - DNA, 761 bp, Homo Sapiens
  misc_feature (519)..(519): n is a, c, g, or t
  misc_feature (667)..(667): n is a, c, g, or t
agaaattactatgagaggatcgcatcaccatcaccatcacggatcctatttaggtgacactatagaatcgtcgacccacgcgtccggagaagaggacggctgccacccttgccacccacgagctccgtgccgtcaaagggcccctgctgtactgcgcccggcccccacaggacctcaagattgtccccttggggcggaaagaagccaaggccaaggagctggtgcggcagctgcagctggaggccgaggagcagaggaagcagaagaagcggcagagtgtgtcgggcctgcacagataccttcacttgctggatggaaatgaaaattacccgtgtcttgtggatgcagacggtgatgtgatttccttcccaccaataaccaacagtgagaagacaaaggttaagaaaacgacttctgatttgtttttggaagtaacaagtgccaccagtctgcagatttgcaaggatgtcatggatgccctcattctgaaaatggcagaaatgaaaaagtacactttanaaaataaagaggaaggatcactctcagatactgaagccgatgcagtctctggacaacttccagatcccacaacgaatcccagtgctggaaaggacgggccctcccttctggtggtggagcaggtccgggtggtggatctggaagggancctgaaggtggtgtacccgtccaaaggcccgacctggccactgccccctccccacgtgactgtcgtgcgctgaacccaggggcccgccctgtcc

SEQ ID NO: 102 - DNA, 1320 bp, Homo Sapiens
  misc_feature (882)..(882): n is a, c, g, or t
  misc_feature (920)..(920): n is a, c, g, or t
  misc_feature (943)..(943): n is a, c, g, or t
  misc_feature (959)..(959): n is a, c, g, or t
  misc_feature (965)..(965): n is a, c, g, or t
  misc_feature (972)..(972): n is a, c, g, or t
  misc_feature (986)..(986): n is a, c, g, or t
  misc_feature (1020)..(1020): n is a, c, g, or t
  misc_feature (1023)..(1023): n is a, c, g, or t
  misc_feature (1033)..(1033): n is a, c, g, or t
  misc_feature (1039)..(1039): n is a, c, g, or t
  misc_feature (1043)..(1043): n is a, c, g, or t
  misc_feature (1046)..(1046): n is a, c, g, or t
  misc_feature (1056)..(1056): n is a, c, g, or t
  misc_feature (1060)..(1061): n is a, c, g, or t
  misc_feature (1070)..(1070): n is a, c, g, or t
  misc_feature (1073)..(1073): n is a, c, g, or t
  misc_feature (1085)..(1085): n is a, c, g, or t
  misc_feature (1091)..(1091): n is a, c, g, or t
  misc_feature (1094)..(1094): n is a, c, g, or t
  misc_feature (1097)..(1097): n is a, c, g, or t
  misc_feature (1108)..(1108): n is a, c, g, or t
  misc_feature (1112)..(1112): n is a, c, g, or t
  misc_feature (1115)..(1115): n is a, c, g, or t
  misc_feature (1117)..(1117): n is a, c, g, or t
  misc_feature (1123)..(1123): n is a, c, g, or t
  misc_feature (1129)..(1129): n is a, c, g, or t
  misc_feature (1134)..(1134): n is a, c, g, or t
  misc_feature (1144)..(1144): n is a, c, g, or t
  misc_feature (1151)..(1151): n is a, c, g, or t
  misc_feature (1155)..(1155): n is a, c, g, or t
  misc_feature (1158)..(1158): n is a, c, g, or t
  misc_feature (1166)..(1167): n is a, c, g, or t
  misc_feature (1171)..(1171): n is a, c, g, or t
  misc_feature (1174)..(1174): n is a, c, g, or t
  misc_feature (1177)..(1177): n is a, c, g, or t
  misc_feature (1179)..(1179): n is a, c, g, or t
  misc_feature (1181)..(1181): n is a, c, g, or t
  misc_feature (1183)..(1183): n is a, c, g, or t
  misc_feature (1202)..(1202): n is a, c, g, or t
  misc_feature (1210)..(1210): n is a, c, g, or t
  misc_feature (1214)..(1214): n is a, c, g, or t
  misc_feature (1227)..(1227): n is a, c, g, or t
  misc_feature (1229)..(1231): n is a, c, g, or t
  misc_feature (1233)..(1234): n is a, c, g, or t
  misc_feature (1240)..(1243): n is a, c, g, or t
  misc_feature (1257)..(1257): n is a, c, g, or t
  misc_feature (1265)..(1266): n is a, c, g, or t
  misc_feature (1268)..(1270): n is a, c, g, or t
  misc_feature (1274)..(1274): n is a, c, g, or t
  misc_feature (1279)..(1281): n is a, c, g, or t
  misc_feature (1283)..(1283): n is a, c, g, or t
  misc_feature (1293)..(1296): n is a, c, g, or t
  misc_feature (1305)..(1308): n is a, c, g, or t
  misc_feature (1311)..(1313): n is a, c, g, or t
  misc_feature (1319)..(1320): n is a, c, g, or t
aatagagaaattagtatgagaggatcgcatcaccatcaccatcacggatcctatttaggtgacactatagaatcgtcgacccacgcgtccgcccacgcgtccgcccacgcgtccggtcatcagcagctgcctgctggaattcttcccatggtgcccgaggtcgcccaggctgtaggagttagtcaaggacatcacaccaaagattttaccagggcagctccgaatcctgccaaggccacggtaactgccatgatagcccgagagttgttgtatgggggcacctcgcccacagccgagaccattttaaagaataacatctcttcaggccacgtaccccatggacctctcacgagaccctctgagcaactggactatctttccagagtccagggattccaggttgaatacaaagacttccccaaaaacaacaagaacgaatttgtatctcttatcaattgctcctctcagccacctctgatcagccatggtatcggcaaggatgtggagtcctgccatgatatggctgcgctgaacatcttaaagttgctgtctgagttggaccaacaaagtacagagatgccaagaacaggaaacggaccaatgtctgtgtgtgggaggtgctgaaccttttctggccatgaaccattataaaatcccaacatatatactgaaaatactgaaactgctttgaaaatttggaatttctgatacctccagtgggccgagagacacggtgggtaaaggatgtgggcagcagcagggaagacaacagaaacacaaggaggcggctgtggccgggctggactgtgctggggtttgttgtgatggccactcggtgacctggcggtccctacgcaatagcagctgcctgtggggaagaanggctgcccagccagctggttctcccgggacaccagcanatccacaccctgggcacctccgngttgggtctttttttnccctgngtgaaanaaaaacggcacgancccttctcagctggctcactcaaaacattggganaancctggaagcntgccanaaanagnctttgacggncccnnagctaagcnccnaaaaatcaatgnttctantcncgngaccaattttntagnggncnggcccncacctntgganacccaacatnccaaggntttnttncaaagggnngggntcnaantncnanttttttttggggaaggacnaaaaaaantttntttggaattcccntnnncnnaaaaannnnttggaattttgganggtttttnnannncccnaaaannncngggggggggnnnnttttttttnnnnccnnnttttgnn

SEQ ID NO: 103 - DNA, 1197 bp, Homo Sapiens
  misc_feature (200)..(200): n is a, c, g, or t
  misc_feature (764)..(764): n is a, c, g, or t
  misc_feature (788)..(788): n is a, c, g, or t
  misc_feature (795)..(795): n is a, c, g, or t
  misc_feature (806)..(806): n is a, c, g, or t
  misc_feature (809)..(809): n is a, c, g, or t
  misc_feature (812)..(812): n is a, c, g, or t
  misc_feature (828)..(828): n is a, c, g, or t
  misc_feature (833)..(833): n is a, c, g, or t
  misc_feature (855)..(855): n is a, c, g, or t
  misc_feature (877)..(877): n is a, c, g, or t
  misc_feature (899)..(899): n is a, c, g, or t
  misc_feature (909)..(909): n is a, c, g, or t
  misc_feature (913)..(913): n is a, c, g, or t
  misc_feature (926)..(926): n is a, c, g, or t
  misc_feature (932)..(932): n is a, c, g, or t
  misc_feature (935)..(935): n is a, c, g, or t
  misc_feature (939)..(939): n is a, c, g, or t
  misc_feature (967)..(967): n is a, c, g, or t
  misc_feature (975)..(975): n is a, c, g, or t
  misc_feature (983)..(983): n is a, c, g, or t
  misc_feature (998)..(999): n is a, c, g, or t
  misc_feature (1003)..(1003): n is a, c, g, or t
  misc_feature (1009)..(1009): n is a, c, g, or t
  misc_feature (1022)..(1022): n is a, c, g, or t
  misc_feature (1031)..(1032): n is a, c, g, or t
  misc_feature (1040)..(1040): n is a, c, g, or t
  misc_feature (1042)..(1042): n is a, c, g, or t
  misc_feature (1050)..(1051): n is a, c, g, or t
  misc_feature (1055)..(1055): n is a, c, g, or t
  misc_feature (1062)..(1062): n is a, c, g, or t
  misc_feature (1072)..(1074): n is a, c, g, or t
  misc_feature (1076)..(1077): n is a, c, g, or t
  misc_feature (1092)..(1092): n is a, c, g, or t
  misc_feature (1096)..(1096): n is a, c, g, or t
  misc_feature (1098)..(1098): n is a, c, g, or t
  misc_feature (1109)..(1109): n is a, c, g, or t
  misc_feature (1114)..(1114): n is a, c, g, or t
  misc_feature (1125)..(1125): n is a, c, g, or t
  misc_feature (1127)..(1129): n is a, c, g, or t
  misc_feature (1131)..(1131): n is a, c, g, or t
  misc_feature (1133)..(1134): n is a, c, g, or t
  misc_feature (1138)..(1138): n is a, c, g, or t
  misc_feature (1140)..(1140): n is a, c, g, or t
  misc_feature (1142)..(1142): n is a, c, g, or t
  misc_feature (1144)..(1144): n is a, c, g, or t
  misc_feature (1150)..(1150): n is a, c, g, or t
  misc_feature (1153)..(1155): n is a, c, g, or t
  misc_feature (1157)..(1159): n is a, c, g, or t
  misc_feature (1161)..(1161): n is a, c, g, or t
  misc_feature (1163)..(1164): n is a, c, g, or t
  misc_feature (1167)..(1167): n is a, c, g, or t
  misc_feature (1169)..(1170): n is a, c, g, or t
  misc_feature (1173)..(1173): n is a, c, g, or t
  misc_feature (1176)..(1176): n is a, c, g, or t
  misc_feature (1180)..(1180): n is a, c, g, or t
  misc_feature (1192)..(1192): n is a, c, g, or t
tagagaaattactatgagaggatcgcatcaccatcaccatcacggatcctatttaggtgacactatagaatcgtcgacccacgcgtccgacagagcagagcaagtcggagctgagctcacggctggacacgctgagtgcggagaaggatgctctgagtggagctgtgcggcagcgggaggcagacctgctggcggcgcanagcctggtgcgcgagacagaggcggcgctgagccgggagcagcagcgcagctcccaggagcagggcgagttgcagggccggctggcagagagggagtctcaggagcaggggctgcggcagaggctgctggacgagcagttcgcagtgttgcggggcgctgctgccgaggccgcgggcatcctgcaggatgccgtgagcaagctggacgaccccctgcacctgcgctgtaccagctccccagactacctggtgagcagggcccaggaggccttggatgccgtgagcaccctggaggagggccacgcccagtacctgacctccttggcagacgcctccgccctggtggcagctctgacccgcttctcccacctggctgcggataccatcatcaatggcggtgccacctcgcacctggctcccaccgaccctgccgaccgcctcatagacacctgcagggagtgcggggcccgggctctggagctcatggggcagctgcaggaccagcaggctctgcggcacatgcaggccagcctggtgcggacacccctgcagggcatccttcanctgggccaggaactgaaacccaanagcctanatgtgcggcanganganctgggggccgtggtcnacaangaaatggcggccacatccgcanccattgaaaatgctgtgcggangattgaggacatgatgaaccangcacgccacnccanctcgggggtgaanctggangtnaacnaaaagaatcctcaactcctgcacaaacntgatgaangctatccngctcctggtgacaanntccnctaacntgcaaaagaaatnttgaaaacnncagggggncncccccccnncagnaattttnccccaaaaannncnnttgaaccaaagcctntttngncctccaaggtntgggnttgggaacccncnnntngnngaancncntnaaaagnggnnntnnncngnnaantnnaanaantttnttttttttcccnaaaat

SEQ ID NO: 104 - DNA, 1411 bp, Homo Sapiens
  misc_feature (896)..(896): n is a, c, g, or t
  misc_feature (905)..(905): n is a, c, g, or t
  misc_feature (937)..(938): n is a, c, g, or t
  misc_feature (941)..(941): n is a, c, g, or t
  misc_feature (959)..(959): n is a, c, g, or t
  misc_feature (977)..(977): n is a, c, g, or t
  misc_feature (1003)..(1003): n is a, c, g, or t
  misc_feature (1016)..(1016): n is a, c, g, or t
  misc_feature (1031)..(1031): n is a, c, g, or t
  misc_feature (1035)..(1035): n is a, c, g, or t
  misc_feature (1039)..(1039): n is a, c, g, or t
  misc_feature (1046)..(1046): n is a, c, g, or t
  misc_feature (1064)..(1064): n is a, c, g, or t
  misc_feature (1067)..(1067): n is a, c, g, or t
  misc_feature (1090)..(1090): n is a, c, g, or t
  misc_feature (1101)..(1101): n is a, c, g, or t
  misc_feature (1105)..(1105): n is a, c, g, or t
  misc_feature (1107)..(1107): n is a, c, g, or t
  misc_feature (1110)..(1110): n is a, c, g, or t
  misc_feature (1123)..(1123): n is a, c, g, or t
  misc_feature (1131)..(1132): n is a, c, g, or t
  misc_feature (1139)..(1139): n is a, c, g, or t
  misc_feature (1148)..(1148): n is a, c, g, or t
  misc_feature (1155)..(1155): n is a, c, g, or t
  misc_feature (1160)..(1160): n is a, c, g, or t
  misc_feature (1163)..(1163): n is a, c, g, or t
  misc_feature (1167)..(1167): n is a, c, g, or t
  misc_feature (1177)..(1177): n is a, c, g, or t
  misc_feature (1183)..(1183): n is a, c, g, or t
  misc_feature (1188)..(1188): n is a, c, g, or t
  misc_feature (1195)..(1195): n is a, c, g, or t
  misc_feature (1210)..(1210): n is a, c, g, or t
  misc_feature (1228)..(1228): n is a, c, g, or t
  misc_feature (1231)..(1231): n is a, c, g, or t
  misc_feature (1244)..(1244): n is a, c, g, or t
  misc_feature (1246)..(1246): n is a, c, g, or t
  misc_feature (1250)..(1251): n is a, c, g, or t
  misc_feature (1259)..(1259): n is a, c, g, or t
  misc_feature (1261)..(1262): n is a, c, g, or t
  misc_feature (1268)..(1268): n is a, c, g, or t
  misc_feature (1274)..(1274): n is a, c, g, or t
  misc_feature (1283)..(1283): n is a, c, g, or t
  misc_feature (1285)..(1285): n is a, c, g, or t
  misc_feature (1287)..(1287): n is a, c, g, or t
  misc_feature (1289)..(1289): n is a, c, g, or t
  misc_feature (1292)..(1293): n is a, c, g, or t
  misc_feature (1301)..(1302): n is a, c, g, or t
  misc_feature (1308)..(1308): n is a, c, g, or t
  misc_feature (1312)..(1312): n is a, c, g, or t
  misc_feature (1315)..(1315): n is a, c, g, or t
  misc_feature (1319)..(1319): n is a, c, g, or t
  misc_feature (1326)..(1328): n is a, c, g, or t
  misc_feature (1330)..(1330): n is a, c, g, or t
  misc_feature (1336)..(1336): n is a, c, g, or t
  misc_feature (1341)..(1341): n is a, c, g, or t
  misc_feature (1345)..(1345): n is a, c, g, or t
  misc_feature (1359)..(1359): n is a, c, g, or t
  misc_feature (1385)..(1385): n is a, c, g, or t
  misc_feature (1392)..(1393): n is a, c, g, or t
  misc_feature (1409)..(1409): n is a, c, g, or t
  misc_feature (1411)..(1411): n is a, c, g, or t
atagagaaattactatgagaggatcgcatcaccatcaccatcacggatcctatttaggtgacactatagaatcgtcgacccacgcgtccgcccacgcgtccgcccacgcgtccggaggaagtccccgaggcgcacagagcaagcccacgcgagggcacctctggaggggagcgcctgcaggaccttgtaaagtcaaaaatgtcagaaacttccaggaccgcctttggaggcagaagagcagttccacccaataactctaatgcagcggaagatgacctgcccacagtggagcttcagggcgtggtgccccggggcgtcaacctgcaagagtttcttaatgtcacgagcgttcacctgttcaaggagagatgggacactaacaaggtggaccaccacactgacaagtatgaaaacaacaagctgattgtccgcagagggcagtctttctatgtgcagattgacttcagtcgtccatatgaccccagaagggatctcttcagggtggaatacgtcattggtcgctacccacaggagaacaagggaacctacatcccagtgcctatagtctcagagttacaaagtggaaagtggggggccaagattgtcatgagagaggacaggtctgtgcggctgtccatccagtcttcccccaaatgtattgtggggaaattccgcatgtatgttgctgtctggactccctatggcgtacttcgaaccagtcgaaacccagaaacagacacgtacattctcttcaatccttggtgtgaagatgatgctgtgtatctggacaatgagaaagaaagagaagagtatgtcctgaatgacatcggggtaattttttatgggagaggtcaatgacatcaagaccagaagctggagctatggtcagtttgaanatggcatcntggacacttgcctgttgtgatggacagaagcnnaantggacctctctggaaaanggaatcccatcaaagtcnacccgtgtggggtctgcaatggtgantgccaaaaaaatnacaaaggtttcctcnttgnatcntgggaanaaattctatgcctatggngtncccccctcggcctggaatggaancgttaaatttntttngnaanaccggaacctttnaaaatccnntcccggnatggccaangccgggnttttnccngggntcttttaaanattttncaaanccttggnaatcccccaaaaatntttcccattttttttttnccntaaaaaagttccnantttnnaaagggantnntcttgnaaaaangggaacgtnantncnacnncccaggannttgggnaaanccnttcngaaaaannngnaaaaanccccncccnttttttttaagggnaacttaaacccccccaaaaaaagggnttttggnncccctttttaaaaaangn

SEQ ID NO: 105 - DNA, 1015 bp, Homo Sapiens
attaactatgagaggtcgcatcaccatcaccatcacggatcctatttaggtgacactatagaatcgtcgacccacgcgtccgcctgcgtcgctccgggagctgccgacggacggagcgcccccgcccccgcccggccgcccgcccgccgccgccatgcccttctccaacagccacaacgcactgaagctgcgcttcccggccgaggacgagttccccgacctgagcgcccacaacaaccacatggccaaggtgctgacccccgagctgtacgcggagctgcgcgccaagagcacgccgagcggcttcacgctggacgacgtcatccagacaggcgtggacaacccgggccacccgtacatcatgaccgtgggctgcgtggcgggcgacgaggagtcctacgaagtgttcaaggatctcttcgaccccatcatcgaggaccggcacggcggctacaagcccagcgatgagcacaagaccgacctcaaccccgacaacctgcagggcggcgacgacctggaccccaactacgtgctgagctcgcgggtgcgcacgggccgcagcatccgtggcttctgcctccccccgcactgcagccgcggggagcgccgagccatcgagaagctcgcggtggaagccctgtccagcctggacggcgacctggcgggccgatactacgcgctcaagagcatgacggaggcggagcagcagcagctcatcgacgaccacttcctcttcgacaagcccgtgtcgcccctgctgctggcctcgggcatggcccgcgactggcccgacgcccgcggtatctggcacaatgacaataagaccttcctggtgtgggtcaacgaggaggaccacctgcgggtcatctccatgcagaaggggggcaacatgaaggaggtgttcacccgcttctgcaccggcctcacccagattgaaactctcttcaagtctaaggactatgagttcatgtggaaccctcacctgggctacatcctcacctgcccatccaacctg

SEQ ID NO: 106 - DNA, 1310 bp, Homo Sapiens
  misc_feature (638)..(638): n is a, c, g, or t
  misc_feature (777)..(777): n is a, c, g, or t
  misc_feature (829)..(829): n is a, c, g, or t
  misc_feature (850)..(850): n is a, c, g, or t
  misc_feature (862)..(862): n is a, c, g, or t
  misc_feature (875)..(875): n is a, c, g, or t
  misc_feature (923)..(923): n is a, c, g, or t
  misc_feature (947)..(947): n is a, c, g, or t
  misc_feature (958)..(958): n is a, c, g, or t
  misc_feature (961)..(961): n is a, c, g, or t
  misc_feature (970)..(970): n is a, c, g, or t
  misc_feature (982)..(982): n is a, c, g, or t
  misc_feature (987)..(987): n is a, c, g, or t
  misc_feature (993)..(993): n is a, c, g, or t
  misc_feature (999)..(999): n is a, c, g, or t
  misc_feature (1002)..(1002): n is a, c, g, or t
  misc_feature (1014)..(1014): n is a, c, g, or t
  misc_feature (1024)..(1024): n is a, c, g, or t
  misc_feature (1036)..(1036): n is a, c, g, or t
  misc_feature (1041)..(1041): n is a, c, g, or t
  misc_feature (1043)..(1043): n is a, c, g, or t
  misc_feature (1086)..(1086): n is a, c, g, or t
  misc_feature (1090)..(1090): n is a, c, g, or t
  misc_feature (1093)..(1093): n is a, c, g, or t
  misc_feature (1102)..(1102): n is a, c, g, or t
  misc_feature (1106)..(1106): n is a, c, g, or t
  misc_feature (1119)..(1119): n is a, c, g, or t
  misc_feature (1123)..(1123): n is a, c, g, or t
  misc_feature (1128)..(1128): n is a, c, g, or t
  misc_feature (1130)..(1130): n is a, c, g, or t
  misc_feature (1137)..(1137): n is a, c, g, or t
  misc_feature (1139)..(1139): n is a, c, g, or t
  misc_feature (1145)..(1145): n is a, c, g, or t
  misc_feature (1154)..(1154): n is a, c, g, or t
  misc_feature (1158)..(1158): n is a, c, g, or t
  misc_feature (1169)..(1172): n is a, c, g, or t
  misc_feature (1175)..(1175): n is a, c, g, or t
  misc_feature (1184)..(1185): n is a, c, g, or t
  misc_feature (1190)..(1191): n is a, c, g, or t
  misc_feature (1193)..(1196): n is a, c, g, or t
  misc_feature (1199)..(1200): n is a, c, g, or t
  misc_feature (1205)..(1205): n is a, c, g, or t
  misc_feature (1207)..(1209): n is a, c, g, or t
  misc_feature (1217)..(1217): n is a, c, g, or t
  misc_feature (1219)..(1223): n is a, c, g, or t
  misc_feature (1230)..(1230): n is a, c, g, or t
  misc_feature (1234)..(1236): n is a, c, g, or t
  misc_feature (1239)..(1242): n is a, c, g, or t
  misc_feature (1246)..(1247): n is a, c, g, or t
  misc_feature (1253)..(1290): n is a, c, g, or t
  misc_feature (1295)..(1295): n is a, c, g, or t
  misc_feature (1305)..(1308): n is a, c, g, or t
  misc_feature (1310)..(1310): n is a, c, g, or t
gaaattactatggagaggatcgcatcaccatcaccatcacggatcctatttaggtgacactatagaatcgtcgacccacgcgtccggaagaggcgagaacgacccccggaccgaccaaagcccgcgcgccgctgcatcccgcgtccagcacctacgtcccgctgccgtcgccgccgccaccatgcccaagagaaaggctgaaggggatgctaagggagataaagcaaaggtgaaggacgaaccacagagaagatccgcgaggttgtctgctaaacctgctcctccaaagccagagcccaagcctaaaaaggcccctgcaaagaagggagagaaggtacccaaagggaaaaagggaaaagctgatgctggcaaggaggggaataaccctgcagaaaatggagatgccaaaacagaccaggcacagaaagctgaaggtgctggagatgccaagtgaagtgtgtgcatttttgataactgtgtacttctggtgactgtacagtttgaaatactattttttatcaagttttataaaaatgcagaattttgttttactttttttttttttttaaaagctatgttgttagcacacagaacacttcattgttgtttttgggggaaggggcatatgtcactaatanaatgtctccaaagctggattgatgtggagaaaacacctttcccttctagttttgagagacttcctcttggctcccaggaggagggattccctgactttgacacacatggccaccttggcacaaaagccttgtggtatanaaaaacaaatttgtttttatgtcctcttctccctttccatctttcagcatanacttaactcccttaagcccanacatctgttganacctgacccctantcattggttaccagtgtgtcaggcaatctggactttccagtgatgccnctgaaatggcacctgtcaaaaaancagtggttccnttnctaaattgnggattttcaaanaaatnctgccnttttcnttnccttcctgaaantcagggtcgnttgtgaaaattnttaananctgctaaatgtgaaatgtcacccccctctaaattttcctgttnaaanatnaaagaaaanttcntggggttttaaangggnttttnanttttggnancccttnaaaaaggantttnaaatttttttnnnnttnaaaattttnnccccnntnnnnccnnaaaancnnntttttttngnnnnnttttttnaaannnggnnnntttnnaaaaannnnnnnnnnnnnnnnnnnnnnnnnnnnnnnnnnnnnnggggncccctttttnnnntn

SEQ ID NO: 107 - DNA, 1339 bp, Homo Sapiens
  misc_feature (845)..(845): n is a, c, g, or t
  misc_feature (868)..(868): n is a, c, g, or t
  misc_feature (932)..(932): n is a, c, g, or t
  misc_feature (982)..(982): n is a, c, g, or t
  misc_feature (991)..(991): n is a, c, g, or t
  misc_feature (1003)..(1003): n is a, c, g, or t
  misc_feature (1009)..(1009): n is a, c, g, or t
  misc_feature (1017)..(1017): n is a, c, g, or t
  misc_feature (1019)..(1019): n is a, c, g, or t
  misc_feature (1026)..(1026): n is a, c, g, or t
  misc_feature (1032)..(1032): n is a, c, g, or t
  misc_feature (1034)..(1034): n is a, c, g, or t
  misc_feature (1052)..(1052): n is a, c, g, or t
  misc_feature (1089)..(1089): n is a, c, g, or t
  misc_feature (1098)..(1098): n is a, c, g, or t
  misc_feature (1100)..(1100): n is a, c, g, or t
  misc_feature (1102)..(1102): n is a, c, g, or t
  misc_feature (1107)..(1107): n is a, c, g, or t
  misc_feature (1119)..(1119): n is a, c, g, or t
  misc_feature (1122)..(1122): n is a, c, g, or t
  misc_feature (1124)..(1125): n is a, c, g, or t
  misc_feature (1130)..(1130): n is a, c, g, or t
  misc_feature (1142)..(1142): n is a, c, g, or t
  misc_feature (1161)..(1161): n is a, c, g, or t
  misc_feature (1168)..(1169): n is a, c, g, or t
  misc_feature (1193)..(1193): n is a, c, g, or t
  misc_feature (1201)..(1201): n is a, c, g, or t
  misc_feature (1203)..(1203): n is a, c, g, or t
  misc_feature (1212)..(1212): n is a, c, g, or t
  misc_feature (1220)..(1220): n is a, c, g, or t
  misc_feature (1223)..(1223): n is a, c, g, or t
  misc_feature (1226)..(1226): n is a, c, g, or t
  misc_feature (1243)..(1243): n is a, c, g, or t
  misc_feature (1250)..(1251): n is a, c, g, or t
  misc_feature (1256)..(1258): n is a, c, g, or t
  misc_feature (1261)..(1261): n is a, c, g, or t
  misc_feature (1274)..(1274): n is a, c, g, or t
  misc_feature (1276)..(1276): n is a, c, g, or t
  misc_feature (1284)..(1286): n is a, c, g, or t
  misc_feature (1295)..(1296): n is a, c, g, or t
  misc_feature (1303)..(1304): n is a, c, g, or t
  misc_feature (1306)..(1306): n is a, c, g, or t
  misc_feature (1312)..(1312): n is a, c, g, or t
  misc_feature (1315)..(1315): n is a, c, g, or t
  misc_feature (1338)..(1339): n is a, c, g, or t
tagagaaattactatgagaggatcgcatcaccatcaccatcacggatcctatttaggtgacactatagaatcgtcgacccacgcgtccgggaacgggtttggcgtgtgggacgcagctgcctctgtactggggagtcacggagtggccgggctccagggacatggcggcggcctctgcggtgtcggtgctgctggtggcggcggagaggaaccggtggcatcgtctcccgagcctgctcctgccgccgaggacatgggtgtggaggcaaagaaccatgaagtacacaacagccacaggaagaaacattaccaaggtcctcattgcaaacagaggagaaattgcctgcagggtgatgcgcacagccaaaaaactgggtgtacagactgtggcggtttatagtgaggctgacagaaattccatgcatgtagatatggcagatgaagcatattccatcggccccgctccctcccagcagagctacctatctatggagaaaatcattcaagtggccaagacctctgctgcacaggctatccatccaggatgcggttttctttcagaaaacatggaatttgctgaactttgtaagcaagaaggaattatttttataggccctcctccatctgcaattagagacatgggtataaagagcacatccaaatccataatggctgctgctggagtacctgttgtggagggttatcatggtgaggaccaatcagaccagtgcctgaaggaacacgccaggagaattggctatcctgtcatgattaaagccgtccggggtggaggaggaaaaggaatgaggattgttagatcagaacaagaatttcagaacagttanagtcagcacggagagaagctaanaagtctttcaatgatgatgctatgctgatcgagaagtttgtaaacacaccgaggcatgtaaaantccagggtgtttggtgatcaccatggcaatgctgtgtacttgtttgaaanaaactgtantgtgcaaaagcnacatcnaaaaatcntngaggagnccccancncctggtattaatctgaantaaaaaaaactggaaaaactgcatcaaactgctaaanctgtaattntntngaacngggactgggganttntnnggacncaaacatatttntgtttttggaaaaaaaaanggtgcannggaaatctgtttttgaaaatcccngaacttcntntgggagggnccttaaanttnccngaaaaaattttttcccnaaaaaanntcccnnnccncctccccccaaantnggaaaatnnnaatttttcnnggggggnntntgcccnttncccaaacccccccaaaagggggnn

SEQ ID NO: 108 - DNA, 1371 bp, Homo Sapiens
  misc_feature (902)..(902): n is a, c, g, or t
  misc_feature (966)..(966): n is a, c, g, or t
  misc_feature (973)..(973): n is a, c, g, or t
  misc_feature (983)..(983): n is a, c, g, or t
  misc_feature (995)..(995): n is a, c, g, or t
  misc_feature (1012)..(1012): n is a, c, g, or t
  misc_feature (1015)..(1015): n is a, c, g, or t
  misc_feature (1017)..(1017): n is a, c, g, or t
  misc_feature (1020)..(1020): n is a, c, g, or t
  misc_feature (1028)..(1028): n is a, c, g, or t
  misc_feature (1032)..(1032): n is a, c, g, or t
  misc_feature (1037)..(1037): n is a, c, g, or t
  misc_feature (1043)..(1043): n is a, c, g, or t
  misc_feature (1050)..(1050): n is a, c, g, or t
  misc_feature (1054)..(1055): n is a, c, g, or t
  misc_feature (1086)..(1086): n is a, c, g, or t
  misc_feature (1096)..(1096): n is a, c, g, or t
  misc_feature (1112)..(1112): n is a, c, g, or t
  misc_feature (1124)..(1130): n is a, c, g, or t
  misc_feature (1134)..(1140): n is a, c, g, or t
  misc_feature (1159)..(1160): n is a, c, g, or t
  misc_feature (1164)..(1165): n is a, c, g, or t
  misc_feature (1167)..(1167): n is a, c, g, or t
  misc_feature (1176)..(1176): n is a, c, g, or t
  misc_feature (1207)..(1209): n is a, c, g, or t
  misc_feature (1211)..(1211): n is a, c, g, or t
  misc_feature (1218)..(1218): n is a, c, g, or t
  misc_feature (1225)..(1225): n is a, c, g, or t
  misc_feature (1233)..(1233): n is a, c, g, or t
  misc_feature (1237)..(1237): n is a, c, g, or t
  misc_feature (1246)..(1246): n is a, c, g, or t
  misc_feature (1249)..(1249): n is a, c, g, or t
  misc_feature (1267)..(1267): n is a, c, g, or t
  misc_feature (1273)..(1273): n is a, c, g, or t
  misc_feature (1276)..(1277): n is a, c, g, or t
  misc_feature (1285)..(1285): n is a, c, g, or t
  misc_feature (1289)..(1289): n is a, c, g, or t
  misc_feature (1296)..(1296): n is a, c, g, or t
  misc_feature (1300)..(1300): n is a, c, g, or t
  misc_feature (1304)..(1304): n is a, c, g, or t
  misc_feature (1306)..(1306): n is a, c, g, or t
  misc_feature (1309)..(1309): n is a, c, g, or t
  misc_feature (1325)..(1325): n is a, c, g, or t
  misc_feature (1331)..(1332): n is a, c, g, or t
  misc_feature (1334)..(1334): n is a, c, g, or t
  misc_feature (1337)..(1337): n is a, c, g, or t
  misc_feature (1360)..(1360): n is a, c, g, or t
gagagattactatgagaggatcgcatcaccatcaccatcacggatcctatttaggtgacactatagaatcgtcgacccacgcgtccgtgaaaaaagtggagaagtctgttaatgaagtgatggaatggatgaataatgtcatgaatgctcaggctaaaaagagtcttgatcaggatccagttgtacgtgctcaggaaattaaaacaaaaatcaaggaattgaacaacacatgtgaacccgttgtaacacaaccgaaaccaaaaattgaatcacccaaactggaaagaactccaaatggcccaaatattgataaaaaggaagaagatttagaagacaaaaacaattttggtgctgaacctccacatcagaatggtgaatgttaccctaatgagaaaaattctgttaatatggacttggactagataaccttaaattggcctattccttcaattaataaaatatttttgccatagtatgtgactctacataacatactgaaactatttatattttcttttttaaggatatttagaaattttgtgtattatatggaaaaagaaaaaaagcttaagtctgtagtctttatgatcctaaaagggaaaattgccttggtaactttcagattcctgtggaattgtgaattcatactaagctttctgtgcagtctcaccatttgcatcactgaggatgaaactgacttttgtcttttggagaaaaaaaactgtactgcttgttcaagagggctgtgattaaaatctttaagcatttgttcctgccaaggtagttttcttgcattttgctctccattcagcatgtgtgtgggtgtggatgtttataaacaagactaagtctgacttcataagggctttctaaaaccatttctgtcccagaagaaaatgacntttttgctttgatattaaaaattcaatgagtaaaacaaaagcctagtccaaaggggttaaccancatgcanaacaaaaacntttaaccttccnctccccctaacagaaantgncntgngaaaatgngganggaanaatggnccatccngtgnnactgattgggacccttttttgacctttaaanaaagtccacnttaagggggcctttcnaaaaaaaaaaannnnnnnaaannnnnnnaggggcgcccccccccaanngggnncnaataacctnattaccgaacctgggccccggtgaaaaaccnnnangcccccnaaccccnccggattnttcnaaaccccgntgnccccggggttttttttgnggaaanccnnccccttgngaantttcggncccngggncnaangggaaaaacccggganaccccnntnatnccccggcccaaaaaattgggctncccccgccccc

SEQ ID NO: 109 - DNA, 1464 bp, Homo Sapiens
  misc_feature (794)..(794): n is a, c, g, or t
  misc_feature (832)..(832): n is a, c, g, or t
  misc_feature (842)..(842): n is a, c, g, or t
  misc_feature (860)..(860): n is a, c, g, or t
  misc_feature (863)..(863): n is a, c, g, or t
  misc_feature (885)..(885): n is a, c, g, or t
  misc_feature (888)..(889): n is a, c, g, or t
  misc_feature (894)..(895): n is a, c, g, or t
  misc_feature (911)..(911): n is a, c, g, or t
  misc_feature (913)..(913): n is a, c, g, or t
  misc_feature (920)..(920): n is a, c, g, or t
  misc_feature (935)..(935): n is a, c, g, or t
  misc_feature (937)..(937): n is a, c, g, or t
  misc_feature (946)..(946): n is a, c, g, or t
  misc_feature (951)..(951): n is a, c, g, or t
  misc_feature (959)..(959): n is a, c, g, or t
  misc_feature (963)..(963): n is a, c, g, or t
  misc_feature (965)..(965): n is a, c, g, or t
  misc_feature (973)..(973): n is a, c, g, or t
  misc_feature (998)..(998): n is a, c, g, or t
  misc_feature (1002)..(1003): n is a, c, g, or t
  misc_feature (1016)..(1016): n is a, c, g, or t
  misc_feature (1019)..(1019): n is a, c, g, or t
  misc_feature (1024)..(1024): n is a, c, g, or t
  misc_feature (1028)..(1028): n is a, c, g, or t
  misc_feature (1031)..(1031): n is a, c, g, or t
  misc_feature (1043)..(1045): n is a, c, g, or t
  misc_feature (1047)..(1047): n is a, c, g, or t
  misc_feature (1054)..(1054): n is a, c, g, or t
  misc_feature (1059)..(1059): n is a, c, g, or t
  misc_feature (1061)..(1061): n is a, c, g, or t
  misc_feature (1068)..(1068): n is a, c, g, or t
  misc_feature (1070)..(1070): n is a, c, g, or t
  misc_feature (1073)..(1073): n is a, c, g, or t
  misc_feature (1079)..(1080): n is a, c, g, or t
  misc_feature (1083)..(1083): n is a, c, g, or t
  misc_feature (1085)..(1085): n is a, c, g, or t
  misc_feature (1088)..(1088): n is a, c, g, or t
  misc_feature (1090)..(1090): n is a, c, g, or t
  misc_feature (1095)..(1096): n is a, c, g, or t
  misc_feature (1098)..(1099): n is a, c, g, or t
  misc_feature (1104)..(1104): n is a, c, g, or t
  misc_feature (1110)..(1110): n is a, c, g, or t
  misc_feature (1115)..(1116): n is a, c, g, or t
  misc_feature (1124)..(1125): n is a, c, g, or t
  misc_feature (1128)..(1128): n is a, c, g, or t
  misc_feature (1137)..(1139): n is a, c, g, or t
  misc_feature (1141)..(1141): n is a, c, g, or t
  misc_feature (1144)..(1144): n is a, c, g, or t
  misc_feature (1151)..(1151): n is a, c, g, or t
  misc_feature (1164)..(1164): n is a, c, g, or t
  misc_feature (1167)..(1167): n is a, c, g, or t
  misc_feature (1169)..(1169): n is a, c, g, or t
  misc_feature (1174)..(1175): n is a, c, g, or t
  misc_feature (1178)..(1178): n is a, c, g, or t
  misc_feature (1183)..(1183): n is a, c, g, or t
  misc_feature (1190)..(1190): n is a, c, g, or t
  misc_feature (1194)..(1196): n is a, c, g, or t
  misc_feature (1209)..(1209): n is a, c, g, or t
  misc_feature (1216)..(1216): n is a, c, g, or t
  misc_feature (1219)..(1219): n is a, c, g, or t
  misc_feature (1223)..(1223): n is a, c, g, or t
  misc_feature (1225)..(1225): n is a, c, g, or t
  misc_feature (1228)..(1228): n is a, c, g, or t
  misc_feature (1231)..(1231): n is a, c, g, or t
  misc_feature (1237)..(1242): n is a, c, g, or t
  misc_feature (1246)..(1246): n is a, c, g, or t
  misc_feature (1262)..(1262): n is a, c, g, or t
  misc_feature (1265)..(1265): n is a, c, g, or t
  misc_feature (1269)..(1269): n is a, c, g, or t
  misc_feature (1282)..(1282): n is a, c, g, or t
  misc_feature (1288)..(1288): n is a, c, g, or t
  misc_feature (1290)..(1292): n is a, c, g, or t
  misc_feature (1295)..(1296): n is a, c, g, or t
  misc_feature (1304)..(1304): n is a, c, g, or t
  misc_feature (1309)..(1310): n is a, c, g, or t
  misc_feature (1312)..(1312): n is a, c, g, or t
  misc_feature (1316)..(1319): n is a, c, g, or t
  misc_feature (1331)..(1331): n is a, c, g, or t
  misc_feature (1334)..(1335): n is a, c, g, or t
  misc_feature (1346)..(1346): n is a, c, g, or t
  misc_feature (1348)..(1348): n is a, c, g, or t
  misc_feature (1351)..(1352): n is a, c, g, or t
  misc_feature (1356)..(1358): n is a, c, g, or t
  misc_feature (1362)..(1362): n is a, c, g, or t
  misc_feature (1364)..(1364): n is a, c, g, or t
  misc_feature (1367)..(1367): n is a, c, g, or t
  misc_feature (1373)..(1374): n is a, c, g, or t
  misc_feature (1376)..(1376): n is a, c, g, or t
  misc_feature (1379)..(1379): n is a, c, g, or t
  misc_feature (1385)..(1386): n is a, c, g, or t
  misc_feature (1388)..(1388): n is a, c, g, or t
  misc_feature (1395)..(1396): n is a, c, g, or t
  misc_feature (1402)..(1403): n is a, c, g, or t
  misc_feature (1407)..(1408): n is a, c, g, or t
  misc_feature (1413)..(1414): n is a, c, g, or t
  misc_feature (1420)..(1420): n is a, c, g, or t
  misc_feature (1423)..(1424): n is a, c, g, or t
  misc_feature (1427)..(1427): n is a, c, g, or t
  misc_feature (1435)..(1435): n is a, c, g, or t
  misc_feature (1438)..(1438): n is a, c, g, or t
  misc_feature (1440)..(1441): n is a, c, g, or t
  misc_feature (1443)..(1443): n is a, c, g, or t
  misc_feature (1445)..(1446): n is a, c, g, or t
  misc_feature (1450)..(1450): n is a, c, g, or t
  misc_feature (1457)..(1457): n is a, c, g, or t
  misc_feature (1461)..(1461): n is a, c, g, or t
atagagagaattactatgagaggatcgcatcaccatcaccatcacggatcctatttaggtgacactatagaatcgtcgacccacgcgtccggtgaaacaaaagctcctgaagaatcatcagaggatgtgacaaaatatcaggaaggagtatctgcagaaaacccagttgagaaccatatcaatataacacaatcagataagttcacagccaagccattggattccaactcaggagaaagaaatgacctcaatcttgatcgctcttgtggggttccagaagaatctgcttcatctgaaaaagccaaggaaccagaaacttcagatcagactagcactgagagtgctaccaatgaaaataacaccaatcctgagcctcagttccaaacagaagccactgggccttcagctcatgaagaaacatccaccagggactctgctcttcaggacacagatgacagtgatgatgacccagtcctgatcccaggtgcaaggtatcgagcaggacctggtgatagacgctctgctgttgcccgtattcaggagttcttcagacggagaaaagaaaggaaagaaatggaagaattggatactttgaacattagaaggccgctagtaaaaatggtttataaaggccatcgcaactccaggacaatgataaaagaagccaatttctggggtgctaactttgtaatgagtggttctgactgtggccacattttcatctgggatcggcacactgctgagcatttgatgcttctggaagctgataatcatgtggtaaactgcctgcaagncacatccgtttgaccaattttagcctcatctggcatanattattgacntaaagatctggtcacccnttngaagaagtctagggatttttanccnnaaaannttgctgatgaaatttntnaacttcnaaaacgaactcttgntnggaagaaanctaanaaaccccntttncngtttccgncctcttttcatgtttgaggaatggntggnnttccctttattcnatnccaancttnacngggtgggagggnnnanaaattanaatgntnctggtcnanaanattgannatngnggnanaggannannatctntttttngccannacctaaannttntaaaattgnnnanaanatttatnaatttttttcttnacnanttttnngtntttanggtaggntttnnnagtttccctcttntgggaanctnaatngnttntanaaattnnnnnntatnggaaattcttaaaacnacntccnaatttttattttnttccgntnnnttnncaaaagtnaattnntnttcnnnntcttctgggatnttnntgttagatatntntcnncgannnggtnanaanttcccnncntcngtggtnntntaaaaanngggttnnaatnnaaaannatcctnaannatnacaaatanttnanntngnngtcnttttttntctnttg

SEQ ID NO: 110 - DNA, 470 bp, Homo Sapiens
atgagaggatcgcatcaccatcaccatcacggatcctatttaggtgacactatagaatcgtcgacccacgcgtccggtgggggccggcgtcccctgcgtgtgtgtgtgtgtgtgtgtgtgtgtggatgtattgacctgtgtttcccaagacagcaggtgccacggcccgccccgcctgccagcccgaattcccgttctcctgtgtctactaacaaggacatgggggtgggcggtgacctccgcatccctcagagctcagagggtcctcgctgccaccggtccccccctagcccgtcatcagccggtggcagctccatcttccattcctggttttagggcaaaatccatggagactgcttccagaaggaatctggctctgagttataaattacttccctggtcctgacagtcacctggggtcccccctctccctggttccacctttctgaggaggagcctggagtcagggc

SEQ ID NO: 111 - DNA, 1414 bp, Homo Sapiens
  misc_feature (534)..(534): n is a, c, g, or t
  misc_feature (595)..(595): n is a, c, g, or t
  misc_feature (694)..(694): n is a, c, g, or t
  misc_feature (773)..(773): n is a, c, g, or t
  misc_feature (797)..(797): n is a, c, g, or t
  misc_feature (804)..(804): n is a, c, g, or t
  misc_feature (810)..(810): n is a, c, g, or t
  misc_feature (819)..(819): n is a, c, g, or t
  misc_feature (828)..(828): n is a, c, g, or t
  misc_feature (832)..(832): n is a, c, g, or t
  misc_feature (844)..(844): n is a, c, g, or t
  misc_feature (855)..(855): n is a, c, g, or t
  misc_feature (863)..(863): n is a, c, g, or t
  misc_feature (873)..(873): n is a, c, g, or t
  misc_feature (880)..(881): n is a, c, g, or t
  misc_feature (905)..(905): n is a, c, g, or t
  misc_feature (907)..(907): n is a, c, g, or t
  misc_feature (915)..(915): n is a, c, g, or t
  misc_feature (919)..(920): n is a, c, g, or t
  misc_feature (923)..(923): n is a, c, g, or t
  misc_feature (929)..(930): n is a, c, g, or t
  misc_feature (956)..(956): n is a, c, g, or t
  misc_feature (960)..(960): n is a, c, g, or t
  misc_feature (962)..(962): n is a, c, g, or t
  misc_feature (969)..(969): n is a, c, g, or t
  misc_feature (976)..(976): n is a, c, g, or t
  misc_feature (989)..(989): n is a, c, g, or t
  misc_feature (1011)..(1011): n is a, c, g, or t
  misc_feature (1015)..(1015): n is a, c, g, or t
  misc_feature (1025)..(1025): n is a, c, g, or t
  misc_feature (1048)..(1049): n is a, c, g, or t
  misc_feature (1053)..(1053): n is a, c, g, or t
  misc_feature (1060)..(1060): n is a, c, g, or t
  misc_feature (1073)..(1073): n is a, c, g, or t
  misc_feature (1076)..(1076): n is a, c, g, or t
  misc_feature (1086)..(1086): n is a, c, g, or t
  misc_feature (1090)..(1090): n is a, c, g, or t
  misc_feature (1100)..(1100): n is a, c, g, or t
  misc_feature (1104)..(1104): n is a, c, g, or t
  misc_feature (1107)..(1107): n is a, c, g, or t
  misc_feature (1120)..(1120): n is a, c, g, or t
  misc_feature (1128)..(1128): n is a, c, g, or t
  misc_feature (1132)..(1132): n is a, c, g, or t
  misc_feature (1142)..(1142): n is a, c, g, or t
  misc_feature (1150)..(1151): n is a, c, g, or t
  misc_feature (1157)..(1157): n is a, c, g, or t
  misc_feature (1162)..(1162): n is a, c, g, or t
  misc_feature (1169)..(1171): n is a, c, g, or t
  misc_feature (1177)..(1177): n is a, c, g, or t
  misc_feature (1179)..(1181): n is a, c, g, or t
  misc_feature (1184)..(1184): n is a, c, g, or t
  misc_feature (1188)..(1188): n is a, c, g, or t
  misc_feature (1192)..(1193): n is a, c, g, or t
  misc_feature (1200)..(1200): n is a, c, g, or t
  misc_feature (1202)..(1202): n is a, c, g, or t
  misc_feature (1216)..(1216): n is a, c, g, or t
  misc_feature (1221)..(1221): n is a, c, g, or t
  misc_feature (1223)..(1224): n is a, c, g, or t
  misc_feature (1234)..(1234): n is a, c, g, or t
  misc_feature (1239)..(1239): n is a, c, g, or t
  misc_feature (1243)..(1243): n is a, c, g, or t
  misc_feature (1246)..(1250): n is a, c, g, or t
  misc_feature (1260)..(1260): n is a, c, g, or t
  misc_feature (1263)..(1264): n is a, c, g, or t
  misc_feature (1266)..(1268): n is a, c, g, or t
  misc_feature (1270)..(1270): n is a, c, g, or t
  misc_feature (1272)..(1273): n is a, c, g, or t
  misc_feature (1291)..(1291): n is a, c, g, or t
  misc_feature (1297)..(1297): n is a, c, g, or t
  misc_feature (1306)..(1306): n is a, c, g, or t
  misc_feature (1315)..(1316): n is a, c, g, or t
  misc_feature (1318)..(1318): n is a, c, g, or t
  misc_feature (1320)..(1321): n is a, c, g, or t
  misc_feature (1327)..(1327): n is a, c, g, or t
  misc_feature (1330)..(1330): n is a, c, g, or t
  misc_feature (1336)..(1339): n is a, c, g, or t
  misc_feature (1341)..(1342): n is a, c, g, or t
  misc_feature (1348)..(1348): n is a, c, g, or t
  misc_feature (1352)..(1352): n is a, c, g, or t
  misc_feature (1355)..(1355): n is a, c, g, or t
  misc_feature (1357)..(1362): n is a, c, g, or t
  misc_feature (1364)..(1364): n is a, c, g, or t
  misc_feature (1367)..(1367): n is a, c, g, or t
  misc_feature (1370)..(1371): n is a, c, g, or t
  misc_feature (1373)..(1373): n is a, c, g, or t
  misc_feature (1375)..(1376): n is a, c, g, or t
  misc_feature (1378)..(1379): n is a, c, g, or t
  misc_feature (1381)..(1382): n is a, c, g, or t
  misc_feature (1386)..(1386): n is a, c, g, or t
  misc_feature (1394)..(1394): n is a, c, g, or t
  misc_feature (1398)..(1399): n is a, c, g, or t
  misc_feature (1405)..(1407): n is a, c, g, or t
  misc_feature (1410)..(1410): n is a, c, g, or t
  misc_feature (1414)..(1414): n is a, c, g, or t
aatagagaaattactatgagaggatcgcatcaccatcaccatcacggatcctatttaggtgacactatagaatcgtcgacccacgcgtccggtcaccctgaaatccagcagcctcccccaggccctgagtcctatgtacccccataccgccccagcctggaggaggacagcgccagcctgtctggggagagtctggatggacatttgcaggctgtggggtcatgtccaaggctgacgccgccccctgctgacctgcctctggcattgccagcccatgggctatggagccgacacatcctgcagcagacactgatggacgaggggctgcggctcgcccgcctcgtctcccacgaccgcgtgggccgcctcagcccctgtgtgcctgcgaagccacctctcgcagagttcgaggaagggctgctggacagatgtcctgccccaggaccccatcccgcgctggtggagggtcgcaggagcagcgtgaaagtggaggctgaggccagccggcagtgagggttggactggtgtcttcanacccaggacctcagacttctggctcacacagacccccacgctctccatccccggaatctantcacaaccctggatccttcctctgcccttctcctgcctccccacctgctccatgggcataagactgtggggcttcaagcaataacaagcagaggcctgnagagaggacacaaggagggtgcgtggtgccctcacccctgcccagagcgagggggcaaggactctgcctccaaggcatntggggttttccccttccctcaaanaaaaaanttccantctctttangttttgcanccanttggtgttgaancaattggaacncatttggnaaaaaggggnaaaaggnngaactttcccttgggaaaagtccnanctaaaaanttgnnaanattttnnccccccaaaatttggggggcttgggnaaananttggaanctggctnccttttccccttntcctttccccgttttttggggnttcngggtttgttnctttaaaaaaaatttaaaaaagnnttgnaattttncccttccaatttncanataaatcccnaaantcctttttgnaaanttntttcccttgcccnaaaaaaangggngggggggggngggaaatnntttttnttggnccccctnnnaaaagncnnnggntttnaatnnaagtccntnccacttggggggtngaccncnncccctatttnaaaantttnaannnnntttttttttnaanntnnnanannaaaaaatttttttttttntttttnaaaaaattnttttttttnntntnnaaaaanaanaaaaannnnanngggggncctnttnannnnnnanaanttnntnannanntnncccnttaaaaanaaannccaaannnttntttn

SEQ ID NO: 112 - DNA, 1376 bp, Homo Sapiens
  misc_feature (740)..(740): n is a, c, g, or t
  misc_feature (762)..(762): n is a, c, g, or t
  misc_feature (770)..(770): n is a, c, g, or t
  misc_feature (786)..(786): n is a, c, g, or t
  misc_feature (856)..(856): n is a, c, g, or t
  misc_feature (865)..(866): n is a, c, g, or t
  misc_feature (911)..(911): n is a, c, g, or t
  misc_feature (915)..(915): n is a, c, g, or t
  misc_feature (942)..(942): n is a, c, g, or t
  misc_feature (951)..(951): n is a, c, g, or t
  misc_feature (966)..(966): n is a, c, g, or t
  misc_feature (977)..(977): n is a, c, g, or t
  misc_feature (997)..(997): n is a, c, g, or t
  misc_feature (1012)..(1013): n is a, c, g, or t
  misc_feature (1016)..(1016): n is a, c, g, or t
  misc_feature (1022)..(1022): n is a, c, g, or t
  misc_feature (1031)..(1031): n is a, c, g, or t
  misc_feature (1037)..(1038): n is a, c, g, or t
  misc_feature (1041)..(1041): n is a, c, g, or t
  misc_feature (1049)..(1049): n is a, c, g, or t
  misc_feature (1052)..(1052): n is a, c, g, or t
  misc_feature (1055)..(1057): n is a, c, g, or t
  misc_feature (1062)..(1062): n is a, c, g, or t
  misc_feature (1064)..(1064): n is a, c, g, or t
  misc_feature (1066)..(1066): n is a, c, g, or t
  misc_feature (1070)..(1071): n is a, c, g, or t
  misc_feature (1077)..(1077): n is a, c, g, or t
  misc_feature (1080)..(1081): n is a, c, g, or t
  misc_feature (1083)..(1083): n is a, c, g, or t
  misc_feature (1096)..(1096): n is a, c, g, or t
  misc_feature (1098)..(1098): n is a, c, g, or t
  misc_feature (1104)..(1104): n is a, c, g, or t
  misc_feature (1107)..(1107): n is a, c, g, or t
  misc_feature (1112)..(1112): n is a, c, g, or t
  misc_feature (1114)..(1114): n is a, c, g, or t
  misc_feature (1117)..(1117): n is a, c, g, or t
  misc_feature (1122)..(1122): n is a, c, g, or t
  misc_feature (1129)..(1130): n is a, c, g, or t
  misc_feature (1134)..(1134): n is a, c, g, or t
  misc_feature (1140)..(1140): n is a, c, g, or t
  misc_feature (1143)..(1143): n is a, c, g, or t
  misc_feature (1147)..(1147): n is a, c, g, or t
  misc_feature (1150)..(1150): n is a, c, g, or t
  misc_feature (1152)..(1152): n is a, c, g, or t
  misc_feature (1157)..(1157): n is a, c, g, or t
  misc_feature (1159)..(1159): n is a, c, g, or t
  misc_feature (1165)..(1165): n is a, c, g, or t
  misc_feature (1167)..(1167): n is a, c, g, or t
  misc_feature (1172)..(1172): n is a, c, g, or t
  misc_feature (1180)..(1180): n is a, c, g, or t
  misc_feature (1183)..(1183): n is a, c, g, or t
  misc_feature (1185)..(1186): n is a, c, g, or t
  misc_feature (1188)..(1189): n is a, c, g, or t
  misc_feature (1191)..(1191): n is a, c, g, or t
  misc_feature (1195)..(1195): n is a, c, g, or t
  misc_feature (1199)..(1199): n is a, c, g, or t
  misc_feature (1206)..(1207): n is a, c, g, or t
  misc_feature (1220)..(1220): n is a, c, g, or t
  misc_feature (1224)..(1224): n is a, c, g, or t
  misc_feature (1236)..(1237): n is a, c, g, or t
  misc_feature (1242)..(1242): n is a, c, g, or t
  misc_feature (1244)..(1244): n is a, c, g, or t
  misc_feature (1247)..(1247): n is a, c, g, or t
  misc_feature (1254)..(1254): n is a, c, g, or t
  misc_feature (1261)..(1262): n is a, c, g, or t
  misc_feature (1265)..(1265): n is a, c, g, or t
  misc_feature (1269)..(1269): n is a, c, g, or t
  misc_feature (1271)..(1271): n is a, c, g, or t
  misc_feature (1276)..(1276): n is a, c, g, or t
  misc_feature (1284)..(1284): n is a, c, g, or t
  misc_feature (1288)..(1288): n is a, c, g, or t
  misc_feature (1291)..(1293): n is a, c, g, or t
  misc_feature (1295)..(1297): n is a, c, g, or t
  misc_feature (1301)..(1301): n is a, c, g, or t
  misc_feature (1304)..(1309): n is a, c, g, or t
  misc_feature (1311)..(1312): n is a, c, g, or t
  misc_feature (1315)..(1315): n is a, c, g, or t
  misc_feature (1321)..(1322): n is a, c, g, or t
  misc_feature (1325)..(1327): n is a, c, g, or t
  misc_feature (1329)..(1329): n is a, c, g, or t
  misc_feature (1334)..(1334): n is a, c, g, or t
  misc_feature (1336)..(1336): n is a, c, g, or t
  misc_feature (1338)..(1338): n is a, c, g, or t
  misc_feature (1340)..(1341): n is a, c, g, or t
  misc_feature (1343)..(1343): n is a, c, g, or t
  misc_feature (1351)..(1352): n is a, c, g, or t
  misc_feature (1361)..(1363): n is a, c, g, or t
  misc_feature (1365)..(1366): n is a, c, g, or t
  misc_feature (1376)..(1376): n is a, c, g, or t
tagagaaattactatgagaggatcgcatcaccatcaccatcacggatcctatttaggtgacactatagaatcgtcgacccacgcgtccgatcgtcctcacgaaggccctggtgggggcatgggcaacagcagtggacatcgtccccacgaaggccctggcggtggcatgggaagtgggcatcgcccccatgaaggccctggtggtagcatgggtgggggtggaggacatcgtccccacgaaggccctggcggtggcatcagtggtggcagtggccatcgtccccatgaaggccctggcggaggaatgggtgccggtggtggacatcgcccccacgaaggccctggcggaagcatgggtggaagtggtggacatcgtccccatgaaggccctggacacggggggccccatggccaccggcctcatgatgtccctggtcaccgaggccatgaccatcgagggccgccacctcatgagcaccgtggccatgatggtcctggccacgggggagggggccaccgagggcacgatggaggccacagccatggaggagacatgtcaaaccgccctgtctgccgacatttcatgatgaagggcaactgccgctatgagaacaactgtgccttctaccacccgggtgtcaatgggccccccctgccctagggaccatttgcctgccctgttcacacaacccctgtggactgcagcctcgctctttccaccctgttatggcttctgtgangcccattttcccttttccccanctgatgangagccggccccctcanttcccacttgcttgggttcctgggggttttctgatcactggtgcgcattgatgtacatattttcctccantctggggannaaaaaaactggaaacgttcctggactgctgaaaaagaaaacccanttgncttcacttttttgaaaaaattcccccntgtaccccnaaaccccttttccantattacccttnaatgcttgaaaaacctaaanctgggttatcttggnnaanaacccntaccctttntattgnnggntccccacnttnccnnnaaaantntnaaannaggatncanntnccctttaaaaaancntcccanctnaattnanttnttccncttgggnngggnaaaatnttnaaanggntnttttntntccccntnccctngaaaaggnccnanncnncntgantttnaattttnnaaaaaaaattttncccnccccccccccannggggncnccntttttanttttttnnaangggnanctttnattttttnaaanccnnntnnncccnggnnnnnnannttnaaaagnnaannntnttttntncngnnantttttttnnaaaaaaaannngnntttttttctn

SEQ ID NO: 113 - DNA, 1476 bp, Homo Sapiens
  misc_feature (8)..(8): n is a, c, g, or t
  misc_feature (90)..(90): n is a, c, g, or t
  misc_feature (489)..(489): n is a, c, g, or t
  misc_feature (647)..(648): n is a, c, g, or t
  misc_feature (673)..(673): n is a, c, g, or t
  misc_feature (700)..(700): n is a, c, g, or t
  misc_feature (739)..(739): n is a, c, g, or t
  misc_feature (767)..(767): n is a, c, g, or t
  misc_feature (783)..(783): n is a, c, g, or t
  misc_feature (786)..(786): n is a, c, g, or t
  misc_feature (797)..(797): n is a, c, g, or t
  misc_feature (812)..(812): n is a, c, g, or t
  misc_feature (816)..(816): n is a, c, g, or t
  misc_feature (818)..(818): n is a, c, g, or t
  misc_feature (830)..(830): n is a, c, g, or t
  misc_feature (859)..(859): n is a, c, g, or t
  misc_feature (867)..(867): n is a, c, g, or t
  misc_feature (896)..(896): n is a, c, g, or t
  misc_feature (909)..(909): n is a, c, g, or t
  misc_feature (914)..(914): n is a, c, g, or t
  misc_feature (926)..(926): n is a, c, g, or t
  misc_feature (928)..(928): n is a, c, g, or t
  misc_feature (936)..(936): n is a, c, g, or t
  misc_feature (940)..(940): n is a, c, g, or t
  misc_feature (948)..(948): n is a, c, g, or t
  misc_feature (951)..(951): n is a, c, g, or t
  misc_feature (954)..(954): n is a, c, g, or t
  misc_feature (971)..(971): n is a, c, g, or t
  misc_feature (978)..(978): n is a, c, g, or t
  misc_feature (984)..(984): n is a, c, g, or t
  misc_feature (987)..(989): n is a, c, g, or t
  misc_feature (994)..(995): n is a, c, g, or t
  misc_feature (1008)..(1008): n is a, c, g, or t
  misc_feature (1012)..(1012): n is a, c, g, or t
  misc_feature (1015)..(1015): n is a, c, g, or t
  misc_feature (1019)..(1019): n is a, c, g, or t
  misc_feature (1022)..(1022): n is a, c, g, or t
  misc_feature (1025)..(1025): n is a, c, g, or t
  misc_feature (1033)..(1033): n is a, c, g, or t
  misc_feature (1049)..(1049): n is a, c, g, or t
  misc_feature (1062)..(1062): n is a, c, g, or t
  misc_feature (1065)..(1065): n is a, c, g, or t
  misc_feature (1072)..(1072): n is a, c, g, or t
  misc_feature (1082)..(1082): n is a, c, g, or t
  misc_feature (1084)..(1084): n is a, c, g, or t
  misc_feature (1086)..(1086): n is a, c, g, or t
  misc_feature (1098)..(1098): n is a, c, g, or t
  misc_feature (1115)..(1115): n is a, c, g, or t
  misc_feature (1121)..(1121): n is a, c, g, or t
  misc_feature (1128)..(1129): n is a, c, g, or t
  misc_feature (1134)..(1134): n is a, c, g, or t
  misc_feature (1137)..(1137): n is a, c, g, or t
  misc_feature (1145)..(1145): n is a, c, g, or t
  misc_feature (1151)..(1151): n is a, c, g, or t
  misc_feature (1157)..(1157): n is a, c, g, or t
  misc_feature (1160)..(1160): n is a, c, g, or t
  misc_feature (1173)..(1173): n is a, c, g, or t
  misc_feature (1178)..(1178): n is a, c, g, or t
  misc_feature (1183)..(1184): n is a, c, g, or t
  misc_feature (1194)..(1196): n is a, c, g, or t
  misc_feature (1199)..(1200): n is a, c, g, or t
  misc_feature (1212)..(1213): n is a, c, g, or t
  misc_feature (1215)..(1215): n is a, c, g, or t
  misc_feature (1222)..(1223): n is a, c, g, or t
  misc_feature (1235)..(1235): n is a, c, g, or t
  misc_feature (1239)..(1239): n is a, c, g, or t
  misc_feature (1241)..(1242): n is a, c, g, or t
  misc_feature (1246)..(1247): n is a, c, g, or t
  misc_feature (1251)..(1251): n is a, c, g, or t
  misc_feature (1254)..(1254): n is a, c, g, or t
  misc_feature (1257)..(1257): n is a, c, g, or t
  misc_feature (1260)..(1260): n is a, c, g, or t
  misc_feature (1264)..(1264): n is a, c, g, or t
  misc_feature (1269)..(1269): n is a, c, g, or t
  misc_feature (1271)..(1271): n is a, c, g, or t
  misc_feature (1275)..(1275): n is a, c, g, or t
  misc_feature (1278)..(1279): n is a, c, g, or t
  misc_feature (1282)..(1282): n is a, c, g, or t
  misc_feature (1285)..(1286): n is a, c, g, or t
  misc_feature (1288)..(1288): n is a, c, g, or t
  misc_feature (1293)..(1293): n is a, c, g, or t
  misc_feature (1300)..(1300): n is a, c, g, or t
  misc_feature (1304)..(1304): n is a, c, g, or t
  misc_feature (1309)..(1309): n is a, c, g, or t
  misc_feature (1322)..(1324): n is a, c, g, or t
  misc_feature (1329)..(1330): n is a, c, g, or t
  misc_feature (1345)..(1347): n is a, c, g, or t
  misc_feature (1349)..(1351): n is a, c, g, or t
  misc_feature (1355)..(1355): n is a, c, g, or t
  misc_feature (1357)..(1357): n is a, c, g, or t
  misc_feature (1359)..(1360): n is a, c, g, or t
  misc_feature (1366)..(1367): n is a, c, g, or t
  misc_feature (1379)..(1380): n is a, c, g, or t
  misc_feature (1383)..(1384): n is a, c, g, or t
  misc_feature (1387)..(1387): n is a, c, g, or t
  misc_feature (1394)..(1394): n is a, c, g, or t
  misc_feature (1396)..(1396): n is a, c, g, or t
  misc_feature (1398)..(1398): n is a, c, g, or t
  misc_feature (1411)..(1411): n is a, c, g, or t
  misc_feature (1424)..(1424): n is a, c, g, or t
  misc_feature (1429)..(1430): n is a, c, g, or t
  misc_feature (1436)..(1436): n is a, c, g, or t
  misc_feature (1440)..(1443): n is a, c, g, or t
  misc_feature (1445)..(1445): n is a, c, g, or t
  misc_feature (1450)..(1450): n is a, c, g, or t
  misc_feature (1462)..(1463): n is a, c, g, or t
  misc_feature (1466)..(1466): n is a, c, g, or t
  misc_feature (1469)..(1470): n is a, c, g, or t
ccattagngaaattacttatggagaggatcgcatcaccatcaccatcacggatcctatttaggtgacactatagaatcgtcgacccacgngatccgcccacgcgatccgtcatgttgctggagaaggatgtgaaccctgggggcaaggaggagaccccagggcagaggccagcggtcacggagactcaccagttggcagaattaaatgagaagaagaatgaaagactccgtgctgcctttggcatcagtgattcttacgtagatggcagctcttttgatcctcagcgtcgtgcccgagaagctaaacaaccagctcctgagcctcccaaaccttacagccttgttcgggagtctagcagttctcgctcaccaaccccaaagcagaagaagaaaaaaaaaaaaaaagggcggccgctccctatagtgagtcgtattaagcttaattagctgagcttggactcctgttgatagatccagtaatgacctcanaactccatctggatttgttcagaacgctcggttgccgccgggcgttttttattggtgagaatccaagctagcttggcgagattttcaggagctaaggaagctaaaatggagaaaaaaatcactggatataccaccgttgatatatcccaatggcatcnnaaaagaacattttgaggcatttcantcagttgctcaatgtacctataaccanaccgttcagctgggatattacggcctttttaaagaccgnaaagaaaaaataaagcacaaagttttantccggcctttaattcncanttctttgcccngccctgatgaaatgnctcntnccggaattttcntattggccaattgaaaagaccggtgaagntgggtganatggggaataagtgttccacccttgttanccccgtttttccntgaancaaacttgaaancntttttcanctcntcttgaanggnaanaccccccaatgattttncccgccngttttnaannnttatnnttcccccaaaagntggngtngttnccntgnaaaaaccntggccctatttccctnaaaaggggtttantgnaaaaaantgtttttttncncncccaccccaatnccctggggggaaatttncccccnctttttnnattantancgggggcnaaaaanaaaaanttnttttccccccccnttttnccccnnagggaaaaannntannacccaaaggcannangagtgcnnaaccccccggcnaatncnngttnncaanatngcnttngaanggccncnctcnccnnccnaanncnttatntttttancacnacccnccaaaagtaccannnccggnncttaatattttttannncnnnatantngnntcctcnnaaccccgcgagnnaannaanccttctntntntgacacaataganaaaaaaaggatcntcaannagacgnacannnntnttatntcactgattcanntgnagnnacctcc

SEQ ID NO: 114 - DNA, 684 bp, Homo Sapiens
agaggtcgcatcaccatcaccatcacggatcctatttaggtgacactatagaatcgtcgacccacgcgtccgcccacgcgtccgcccacgcgtccggcggcaagaaggcccagctcaacgttggcaatgtgctccctgtgggcaccatgcctgagggtacaatcgtgtgctgcctggaggagaagcctggagaccgtggcaagctggcccgggcatcagggaactatgccaccgttatctcccacaaccctgagaccaagaagacccgtgtgaagctgccctccggctccaagaaggttatctcctcagccaacagagctgtggttggtgtggtggctggaggtggccgaattgacaaacccatcttgaaggctggccgggcgtaccacaaatataaggcaaagaggaactgctggccacgagtacggggtgtggccatgaatcctgtggagcatccttttggaggtggcaaccaccagcacatcggcaagccctccaccatccgcagagatgcccctgctggccgcaaagtgggtctcattgctgcccgccggactggacgtctccggggaaccaagactgtgcaggagaaagagaactagtgctgagggcctcaataaagtttgtgtttatgccaaaaaaaaaaaaaaagggcggccgctccctatagtgagtcgtattaag

SEQ ID NO: 115 - DNA, 1303 bp, Homo Sapiens; identical to SEQ ID NO: 95
  misc_feature (895)..(895): n is a, c, g, or t
  misc_feature (950)..(1036): n is a, c, g, or t
  misc_feature (1043)..(1043): n is a, c, g, or t
  misc_feature (1062)..(1062): n is a, c, g, or t
  misc_feature (1065)..(1066): n is a, c, g, or t
  misc_feature (1069)..(1069): n is a, c, g, or t
  misc_feature (1072)..(1073): n is a, c, g, or t
  misc_feature (1078)..(1079): n is a, c, g, or t
  misc_feature (1082)..(1085): n is a, c, g, or t
  misc_feature (1089)..(1089): n is a, c, g, or t
  misc_feature (1094)..(1094): n is a, c, g, or t
  misc_feature (1096)..(1096): n is a, c, g, or t
  misc_feature (1099)..(1099): n is a, c, g, or t
  misc_feature (1102)..(1102): n is a, c, g, or t
  misc_feature (1104)..(1105): n is a, c, g, or t
  misc_feature (1110)..(1111): n is a, c, g, or t
  misc_feature (1115)..(1116): n is a, c, g, or t
  misc_feature (1119)..(1119): n is a, c, g, or t
  misc_feature (1121)..(1122): n is a, c, g, or t
  misc_feature (1127)..(1127): n is a, c, g, or t
  misc_feature (1137)..(1139): n is a, c, g, or t
  misc_feature (1142)..(1143): n is a, c, g, or t
  misc_feature (1151)..(1151): n is a, c, g, or t
  misc_feature (1156)..(1156): n is a, c, g, or t
  misc_feature (1160)..(1160): n is a, c, g, or t
  misc_feature (1162)..(1162): n is a, c, g, or t
  misc_feature (1178)..(1178): n is a, c, g, or t
  misc_feature (1199)..(1199): n is a, c, g, or t
  misc_feature (1202)..(1202): n is a, c, g, or t
  misc_feature (1205)..(1209): n is a, c, g, or t
  misc_feature (1216)..(1216): n is a, c, g, or t
  misc_feature (1226)..(1226): n is a, c, g, or t
  misc_feature (1230)..(1235): n is a, c, g, or t
  misc_feature (1237)..(1237): n is a, c, g, or t
  misc_feature (1239)..(1241): n is a, c, g, or t
  misc_feature (1243)..(1244): n is a, c, g, or t
  misc_feature (1247)..(1247): n is a, c, g, or t
  misc_feature (1251)..(1251): n is a, c, g, or t
  misc_feature (1262)..(1263): n is a, c, g, or t
  misc_feature (1268)..(1270): n is a, c, g, or t
  misc_feature (1276)..(1278): n is a, c, g, or t
  misc_feature (1280)..(1281): n is a, c, g, or t
  misc_feature (1283)..(1286): n is a, c, g, or t
  misc_feature (1290)..(1290): n is a, c, g, or t
  misc_feature (1295)..(1297): n is a, c, g, or t
  misc_feature (1299)..(1300): n is a, c, g, or t

SEQ ID NO: 116 - DNA, 1200 bp, Homo Sapiens
  misc_feature (1)..(1): n is a, c, g, or t
  misc_feature (309)..(309): n is a, c, g, or t
  misc_feature (789)..(789): n is a, c, g, or t
  misc_feature (798)..(798): n is a, c, g, or t
  misc_feature (832)..(832): n is a, c, g, or t
  misc_feature (847)..(847): n is a, c, g, or t
  misc_feature (863)..(863): n is a, c, g, or t
  misc_feature (877)..(877): n is a, c, g, or t
  misc_feature (909)..(909): n is a, c, g, or t
  misc_feature (916)..(916): n is a, c, g, or t
  misc_feature (921)..(921): n is a, c, g, or t
  misc_feature (927)..(927): n is a, c, g, or t
  misc_feature (929)..(929): n is a, c, g, or t
  misc_feature (950)..(951): n is a, c, g, or t
  misc_feature (969)..(969): n is a, c, g, or t
  misc_feature (981)..(981): n is a, c, g, or t
  misc_feature (994)..(994): n is a, c, g, or t
  misc_feature (997)..(997): n is a, c, g, or t
  misc_feature (1007)..(1008): n is a, c, g, or t
  misc_feature (1021)..(1021): n is a, c, g, or t
  misc_feature (1023)..(1024): n is a, c, g, or t
  misc_feature (1028)..(1028): n is a, c, g, or t
  misc_feature (1050)..(1050): n is a, c, g, or t
  misc_feature (1052)..(1053): n is a, c, g, or t
  misc_feature (1064)..(1064): n is a, c, g, or t
  misc_feature (1066)..(1066): n is a, c, g, or t
  misc_feature (1070)..(1070): n is a, c, g, or t
  misc_feature (1072)..(1072): n is a, c, g, or t
  misc_feature (1076)..(1076): n is a, c, g, or t
  misc_feature (1084)..(1084): n is a, c, g, or t
  misc_feature (1090)..(1090): n is a, c, g, or t
  misc_feature (1093)..(1093): n is a, c, g, or t
  misc_feature (1098)..(1098): n is a, c, g, or t
  misc_feature (1103)..(1103): n is a, c, g, or t
  misc_feature (1105)..(1105): n is a, c, g, or t
  misc_feature (1113)..(1113): n is a, c, g, or t
  misc_feature (1124)..(1124): n is a, c, g, or t
  misc_feature (1129)..(1129): n is a, c, g, or t
  misc_feature (1138)..(1140): n is a, c, g, or t
  misc_feature (1165)..(1165): n is a, c, g, or t
  misc_feature (1169)..(1169): n is a, c, g, or t
  misc_feature (1171)..(1172): n is a, c, g, or t
  misc_feature (1175)..(1176): n is a, c, g, or t
  misc_feature (1180)..(1181): n is a, c, g, or t
  misc_feature (1184)..(1184): n is a, c, g, or t
  misc_feature (1190)..(1190): n is a, c, g, or t
  misc_feature (1195)..(1195): n is a, c, g, or t
naattagagaaattactatgagaggatcgcatcaccatcaccatcacggatcctatttaggtgacactatagaatcgtcgacccacgcgtccgctttgccatcccctcgagaagtgactgttacagaacggctcctcctggatggcccaccacctcattcaccagagactcctcaatttccccccacaactggagctgtactgtacactgttaagagaaaccaggttgggcctgaggttcgctcctgccccaaggcatcccccagacttcagaaagagagggagggccaaaaggcagtgagtgagtcanaggctttgatgctggtctgggatgcatcagaaactgagaaattgcctggtaccgtggaaccccctgcttccttcctgagtcctgtttcctcaaagaccagagatgcagggagaagacatgtgtccgggaaaccagacactcaagagagatggctgccctcaagcagagctcgggtgaagacaagagacaggacgtgccctgtccatgaatctccatcaggaattgacacctcagagacttctcccaaagcccctagagggggtttggctaaagacagtggaacacaggccaagggtccagagggggagcagcagccaaaggccgcagaagctacggtgtgtgccaacaacagcaaggtcagctccactggggaaaaggttgtcctgtggacaaggtaggtaagggtggatgacgtgtgtttggaaaaagagcatagaccacatccatgtggctccctagggttaatcatgatacctgggnttacagggnaagctgaccgtgtgatcctcaccatgtgccaagnacaagggggcacagnccacagaaccttcaanatcatcttcccaancagctgggaaaataaaaaccccttgctgaggntttcccnaccgnttttcnanaaactcatgcaactctttccnnactggcctgggaaacccngctctgaagganggaaggatgatgncancccattaccnncaatggcaaaccnanntgtntggaccatgggggacctttttntnntaaaaaaaaancnggantnaaangaaaattnttgggnaantcttnttaancngggaaccnaaaccccaaanggggncccctgggnnnccgggggaaggggggaaattttaancccngnnttnnaaannccnttgganccccnttttt

SEQ ID NO: 117 - DNA, 1200 bp, Homo Sapiens
  misc_feature (862)..(862): n is a, c, g, or t
  misc_feature (873)..(873): n is a, c, g, or t
  misc_feature (878)..(878): n is a, c, g, or t
  misc_feature (897)..(897): n is a, c, g, or t
  misc_feature (961)..(961): n is a, c, g, or t
  misc_feature (973)..(973): n is a, c, g, or t
  misc_feature (981)..(981): n is a, c, g, or t
  misc_feature (987)..(987): n is a, c, g, or t
  misc_feature (996)..(996): n is a, c, g, or t
  misc_feature (1009)..(1009): n is a, c, g, or t
  misc_feature (1019)..(1019): n is a, c, g, or t
  misc_feature (1023)..(1023): n is a, c, g, or t
  misc_feature (1026)..(1027): n is a, c, g, or t
  misc_feature (1076)..(1076): n is a, c, g, or t
  misc_feature (1083)..(1083): n is a, c, g, or t
  misc_feature (1101)..(1101): n is a, c, g, or t
  misc_feature (1104)..(1133): n is a, c, g, or t
  misc_feature (1138)..(1138): n is a, c, g, or t
  misc_feature (1152)..(1152): n is a, c, g, or t
  misc_feature (1159)..(1160): n is a, c, g, or t
  misc_feature (1162)..(1163): n is a, c, g, or t
  misc_feature (1169)..(1169): n is a, c, g, or t
  misc_feature (1172)..(1172): n is a, c, g, or t
  misc_feature (1176)..(1176): n is a, c, g, or t
  misc_feature (1178)..(1178): n is a, c, g, or t
  misc_feature (1180)..(1180): n is a, c, g, or t
  misc_feature (1189)..(1189): n is a, c, g, or t
  misc_feature (1198)..(1198): n is a, c, g, or t
tagagaaattactatgagaggatcgcatcaccatcaccatcacggatcctatttaggtgacactatagaatcgtcgacccacgcgtccgcgattcgaaagaccccagtccctatgcagccttccgaagccccctccctggcggcgctggctatgcccagcagagcgttgacacaaagctgggctgggcatagtccctgtgatgctgagctcaccaggaaggtcgaacgggagcttcctagagcaccttcaagacttgcttggaagacagatcacactccttgttagaaacgcagctagctgcttgtcaggctgttcactcctaactgctagaatttgtttgagaaggatgggcatgcgtatatctgtctgctagaatttgtttgagaaggatgggcatgcgtatatctgtctgctagaatttctgtttgagaaggatgggcatgcgtatatctgtcttttctcaatgttcttactcagcaagtgctgtgagcgcctctcaggtgtgagcagaagagaggcggcttctctctgggtgcatctgaggaggatgttgagaatcatgtttcctgagcttatttagaaattaaaaacgcaacaaaataccaggaacacactcgtgaggatgggaccaggacgagtgtcgggagggcacggaactcctggaggtgctggggtgtggactgtggttcacacccttctggcagtttcttaaggggttaaacatgcgtctctcaccgctgcttctggagaaatgaacacaggtgtccagcaaagccttgtacaaggttcacagcagctttattttaccccgcagtggaacgcttgcgacagcaggagcccgctgcttccacttgtgggaanatgctgggcancgcantgatgggagtgaggaaagnccttgggcacctttgtcgatggggtgggaaaggcctgccaagggcgtgaaaaaacttgggtganggaaaattatcnttgactgngatggnttcccaggngggcaaagtgtcnaaactttccncatngcnnactaaaatatatgcaggttaccatacgtcaatcaggtctatcccaatancgctgcnaaaataatggatggaaanttnnnnnnnnnnnnnnnnnnnnnnnnnnnnnnaaaangggggccccccccnaaagggnncnnaaaaanctnaatnancnaaacttggnacccggtgnaa

SEQ ID NO: 118 - DNA, 1437 bp, Homo Sapiens
  misc_feature (879)..(879): n is a, c, g, or t
  misc_feature (922)..(922): n is a, c, g, or t
  misc_feature (948)..(948): n is a, c, g, or t
  misc_feature (970)..(970): n is a, c, g, or t
  misc_feature (972)..(972): n is a, c, g, or t
  misc_feature (982)..(982): n is a, c, g, or t
  misc_feature (985)..(985): n is a, c, g, or t
  misc_feature (1013)..(1013): n is a, c, g, or t
  misc_feature (1023)..(1023): n is a, c, g, or t
  misc_feature (1030)..(1030): n is a, c, g, or t
  misc_feature (1045)..(1045): n is a, c, g, or t
  misc_feature (1052)..(1052): n is a, c, g, or t
  misc_feature (1055)..(1056): n is a, c, g, or t
  misc_feature (1058)..(1058): n is a, c, g, or t
  misc_feature (1069)..(1069): n is a, c, g, or t
  misc_feature (1104)..(1104): n is a, c, g, or t
  misc_feature (1115)..(1115): n is a, c, g, or t
  misc_feature (1118)..(1118): n is a, c, g, or t
  misc_feature (1122)..(1122): n is a, c, g, or t
  misc_feature (1127)..(1127): n is a, c, g, or t
  misc_feature (1129)..(1129): n is a, c, g, or t
  misc_feature (1135)..(1135): n is a, c, g, or t
  misc_feature (1143)..(1143): n is a, c, g, or t
  misc_feature (1145)..(1145): n is a, c, g, or t
  misc_feature (1152)..(1152): n is a, c, g, or t
  misc_feature (1157)..(1157): n is a, c, g, or t
  misc_feature (1170)..(1171): n is a, c, g, or t
  misc_feature (1175)..(1176): n is a, c, g, or t
  misc_feature (1178)..(1178): n is a, c, g, or t
  misc_feature (1184)..(1184): n is a, c, g, or t
  misc_feature (1192)..(1192): n is a, c, g, or t
  misc_feature (1203)..(1203): n is a, c, g, or t
  misc_feature (1206)..(1206): n is a, c, g, or t
  misc_feature (1213)..(1213): n is a, c, g, or t
  misc_feature (1226)..(1226): n is a, c, g, or t
  misc_feature (1253)..(1253): n is a, c, g, or t
  misc_feature (1255)..(1255): n is a, c, g, or t
  misc_feature (1257)..(1258): n is a, c, g, or t
  misc_feature (1261)..(1261): n is a, c, g, or t
  misc_feature (1263)..(1263): n is a, c, g, or t
  misc_feature (1265)..(1266): n is a, c, g, or t
  misc_feature (1283)..(1283): n is a, c, g, or t
  misc_feature (1290)..(1290): n is a, c, g, or t
  misc_feature (1299)..(1300): n is a, c, g, or t
  misc_feature (1303)..(1303): n is a, c, g, or t
  misc_feature (1319)..(1319): n is a, c, g, or t
  misc_feature (1322)..(1322): n is a, c, g, or t
  misc_feature (1325)..(1325): n is a, c, g, or t
  misc_feature (1327)..(1329): n is a, c, g, or t
  misc_feature (1336)..(1336): n is a, c, g, or t
  misc_feature (1342)..(1342): n is a, c, g, or t
  misc_feature (1350)..(1350): n is a, c, g, or t
  misc_feature (1363)..(1363): n is a, c, g, or t
  misc_feature (1379)..(1379): n is a, c, g, or t
  misc_feature (1381)..(1381): n is a, c, g, or t
  misc_feature (1384)..(1384): n is a, c, g, or t
  misc_feature (1391)..(1393): n is a, c, g, or t
  misc_feature (1395)..(1396): n is a, c, g, or t
  misc_feature (1401)..(1402): n is a, c, g, or t
  misc_feature (1404)..(1405): n is a, c, g, or t
  misc_feature (1413)..(1413): n is a, c, g, or t
  misc_feature (1423)..(1424): n is a, c, g, or t
  misc_feature (1429)..(1429): n is a, c, g, or t
  misc_feature (1435)..(1435): n is a, c, g, or t
agagagattactatgagaggatcgcatcaccatcaccatcacggatcctatttaggtgacactatagaatcgtcgacccacgcgtccgcggacctactgggctccatcctgagctccatggagaagccacccagcctcggtgaccaggagactcggcgcaaggcccgagaacaggccgcccgcctgaagaaactacaagagcaagagaaacaacagaaagtggagtttcgtaaaaggatggagaaggaggtgtcagatttcattcaagacagtgggcagatcaagaaaaagtttcagccaatgaacaagatcgagaggagcatactacatgatgtggtggaagtggctggcctgacatccttctcctttggggaagatgatgactgtcgctatgtcatgatcttcaaaaaggagtttgcaccctcagatgaagagctagactcttaccgtcgtggagaggaatgggacccccagaaggctgaggagaagcggaagctgaaggagctggcccagaggcaagaggaggaggcagcccagcaggggcctgtggtggtgagccctgccagcgactacaaggacaagtacagccacctcatcggcaagggagcagccaaagacgcagcccacatgctacaggccaataagacctacggctgtgtgcccgtggccaataagagggacacacgctccattgaagaggctatgaatgagatcagagccaagaagcgtctgcggcagagtggggaagagttgccgccaacctcctaggcgccccgcccagctccctttgacccctggggcagggcagggggcagggagagacaaggctgctgctattagagcccatcctggagccccacctctgaaccacctcctacnagctgtccctcaggctgggggaaaacaggtgtttgatttgtcnccgttggagcttggatatgtgcgtgncatgtgtgtgtgtgtgtgaaantntgaatgcccnggngggtatttatctgtattattccccgttntgggaatttncttcccntgggggctgggggtncttttanttnnanaattactgttnaccccaaaaaaaaaaaaaaaaaaaaaaaaaaaaangggggcccccnccntaanggggncnaataanctttttantngacttgnccccngttgaaaatcccnnatgnncnccaacnccctctgntttttcaaacnccnggttccnccggggttttttngggaaaccccctccttgggaatttttngncnnggncntnnggggaaaaacccggttncccgttntttcccggnnccnaaaaatttgggttttngtnctngnnnaaccacnctcggntttctttnaaaaaaaaaaaanttccttttttttcccngntcnccttttnnnannggggnngnntttttttntaaaattttnnaaaancctttngg

SEQ ID NO: 119 - DNA, 1319 bp, Homo Sapiens
  misc_feature (841)..(841): n is a, c, g, or t
  misc_feature (872)..(872): n is a, c, g, or t
  misc_feature (878)..(878): n is a, c, g, or t
  misc_feature (884)..(884): n is a, c, g, or t
  misc_feature (896)..(896): n is a, c, g, or t
  misc_feature (911)..(911): n is a, c, g, or t
  misc_feature (927)..(927): n is a, c, g, or t
  misc_feature (951)..(951): n is a, c, g, or t
  misc_feature (969)..(969): n is a, c, g, or t
  misc_feature (1043)..(1044): n is a, c, g, or t
  misc_feature (1051)..(1051): n is a, c, g, or t
  misc_feature (1064)..(1064): n is a, c, g, or t
  misc_feature (1066)..(1066): n is a, c, g, or t
  misc_feature (1079)..(1079): n is a, c, g, or t
  misc_feature (1084)..(1085): n is a, c, g, or t
  misc_feature (1088)..(1088): n is a, c, g, or t
  misc_feature (1092)..(1092): n is a, c, g, or t
  misc_feature (1099)..(1099): n is a, c, g, or t
  misc_feature (1106)..(1106): n is a, c, g, or t
  misc_feature (1116)..(1116): n is a, c, g, or t
  misc_feature (1121)..(1121): n is a, c, g, or t
  misc_feature (1132)..(1132): n is a, c, g, or t
  misc_feature (1135)..(1135): n is a, c, g, or t
  misc_feature (1138)..(1139): n is a, c, g, or t
  misc_feature (1144)..(1144): n is a, c, g, or t
  misc_feature (1163)..(1163): n is a, c, g, or t
  misc_feature (1174)..(1174): n is a, c, g, or t
  misc_feature (1176)..(1176): n is a, c, g, or t
  misc_feature (1181)..(1181): n is a, c, g, or t
  misc_feature (1183)..(1183): n is a, c, g, or t
  misc_feature (1192)..(1192): n is a, c, g, or t
  misc_feature (1197)..(1197): n is a, c, g, or t
  misc_feature (1206)..(1207): n is a, c, g, or t
  misc_feature (1210)..(1210): n is a, c, g, or t
  misc_feature (1213)..(1213): n is a, c, g, or t
  misc_feature (1220)..(1220): n is a, c, g, or t
  misc_feature (1234)..(1234): n is a, c, g, or t
  misc_feature (1239)..(1240): n is a, c, g, or t
  misc_feature (1248)..(1248): n is a, c, g, or t
  misc_feature (1254)..(1254): n is a, c, g, or t
  misc_feature (1257)..(1258): n is a, c, g, or t
  misc_feature (1264)..(1265): n is a, c, g, or t
  misc_feature (1277)..(1277): n is a, c, g, or t
  misc_feature (1298)..(1298): n is a, c, g, or t
  misc_feature (1304)..(1304): n is a, c, g, or t
  misc_feature (1309)..(1309): n is a, c, g, or t
  misc_feature (1317)..(1317): n is a, c, g, or t
aatagagaaattactatgagaggatcgcatcaccatcaccatcacggatcctatttaggtgacactatagaatcgtcgacccacgcgtccgcggacgcgtgggcggacgcgtggggccggcccggccctcgacagcggcaagtttgggagttgcacgagtttgcggggcgggggacaggccaggagggtggccatggaggaggagcgggggtcggcgctggcggccgagtcggcgctggagaagaacgtggccgagctgaccgtcatggacgtgtacgacatcgcgtcgcttgtgggccacgagttcgagcgggtcattgaccagcacggctgcgaggccatcgcgcgcctcatgcccaaggtcgtgcgcgtcctggagatcctggaggtgctggtcagccgccaccacgtcgcgcccgagctggacgagctgcgcctggagctggaccgcctgcgcctggagaggatggaccgcatcgagaaggagcgcaagcaccagaaggagctggagctggtggaggatgtgtggcgaggggaggcgcaggacctcctctcccagatcgcccagctgcaggaggagaacaagcagctcatgaccaacctctcccacaaggatgtcaacttctcagaggaggagttccagaagcatgaaggcatgtcagagcgggagcgacaggtgatgaagaagctgaaggaggtggtggacaaacaacgcgacgagatccgcgccaaggacagggagctgggcctgaaaaatgaggacgttgaggctttacagcagcagcagacacggctgatgaagatcaaccatgaccttcggcaccgggtcacggtggtggangcccaggggaaaagccctgatcgaacagaangtgganctggangcagacctgcanaccaaggagcagganatggccagcctgcgancaaaactgggaaatttccaaaaangctgcagggggaacacanccaaaatgggaagaagaacctgaaacgaacccgtggaaaagaaaacatctccaaccaaaaaagtggcatggatnncaaggancccacccccccgntnacctgcagaactncgganntgntccnaaaaaanaactcantcaaggtttnttttncagagacttgnttnttnnaaatnaaaatggaaaaaaacgaanccaaccccccntnccacnanaattccccnccgantgggataannatnttnttttttnccaaaaaaaccctnccaannaaaaaatncctccnaannttttannggaaaccccccnaatttaaaaaaaaaaaacttntttttnttttntttctctntg

SEQ ID NO: 120 - DNA, 1322 bp, Homo Sapiens
  misc_feature (1)..(1): n is a, c, g, or t
  misc_feature (6)..(6): n is a, c, g, or t
  misc_feature (582)..(582): n is a, c, g, or t
  misc_feature (599)..(599): n is a, c, g, or t
  misc_feature (623)..(623): n is a, c, g, or t
  misc_feature (626)..(626): n is a, c, g, or t
  misc_feature (727)..(727): n is a, c, g, or t
  misc_feature (762)..(762): n is a, c, g, or t
  misc_feature (767)..(767): n is a, c, g, or t
  misc_feature (771)..(771): n is a, c, g, or t
  misc_feature (785)..(785): n is a, c, g, or t
  misc_feature (788)..(788): n is a, c, g, or t
  misc_feature (790)..(790): n is a, c, g, or t
  misc_feature (802)..(802): n is a, c, g, or t
  misc_feature (804)..(804): n is a, c, g, or t
  misc_feature (808)..(808): n is a, c, g, or t
  misc_feature (814)..(814): n is a, c, g, or t
  misc_feature (820)..(820): n is a, c, g, or t
  misc_feature (826)..(826): n is a, c, g, or t
  misc_feature (829)..(829): n is a, c, g, or t
  misc_feature (832)..(832): n is a, c, g, or t
  misc_feature (837)..(837): n is a, c, g, or t
  misc_feature (842)..(842): n is a, c, g, or t
  misc_feature (847)..(847): n is a, c, g, or t
  misc_feature (864)..(864): n is a, c, g, or t
  misc_feature (866)..(866): n is a, c, g, or t
  misc_feature (868)..(868): n is a, c, g, or t
  misc_feature (893)..(893): n is a, c, g, or t
  misc_feature (898)..(898): n is a, c, g, or t
  misc_feature (900)..(900): n is a, c, g, or t
  misc_feature (902)..(902): n is a, c, g, or t
  misc_feature (904)..(905): n is a, c, g, or t
  misc_feature (911)..(911): n is a, c, g, or t
  misc_feature (914)..(916): n is a, c, g, or t
  misc_feature (919)..(919): n is a, c, g, or t
  misc_feature (923)..(923): n is a, c, g, or t
  misc_feature (930)..(930): n is a, c, g, or t
  misc_feature (932)..(932): n is a, c, g, or t
  misc_feature (937)..(937): n is a, c, g, or t
  misc_feature (940)..(940): n is a, c, g, or t
  misc_feature (945)..(945): n is a, c, g, or t
  misc_feature (955)..(955): n is a, c, g, or t
  misc_feature (962)..(962): n is a, c, g, or t
  misc_feature (964)..(964): n is a, c, g, or t
  misc_feature (967)..(967): n is a, c, g, or t
  misc_feature (973)..(973): n is a, c, g, or t
  misc_feature (979)..(980): n is a, c, g, or t
  misc_feature (986)..(988): n is a, c, g, or t
  misc_feature (997)..(997): n is a, c, g, or t
  misc_feature (1002)..(1002): n is a, c, g, or t
  misc_feature (1005)..(1006): n is a, c, g, or t
  misc_feature (1013)..(1013): n is a, c, g, or t
  misc_feature (1023)..(1023): n is a, c, g, or t
  misc_feature (1026)..(1026): n is a, c, g, or t
  misc_feature (1032)..(1032): n is a, c, g, or t
  misc_feature (1050)..(1052): n is a, c, g, or t
  misc_feature (1065)..(1065): n is a, c, g, or t
  misc_feature (1070)..(1070): n is a, c, g, or t
  misc_feature (1084)..(1084): n is a, c, g, or t
  misc_feature (1086)..(1086): n is a, c, g, or t
  misc_feature (1107)..(1107): n is a, c, g, or t
  misc_feature (1110)..(1110): n is a, c, g, or t
  misc_feature (1119)..(1119): n is a, c, g, or t
  misc_feature (1123)..(1123): n is a, c, g, or t
  misc_feature (1125)..(1125): n is a, c, g, or t
  misc_feature (1133)..(1136): n is a, c, g, or t
  misc_feature (1138)..(1138): n is a, c, g, or t
  misc_feature (1145)..(1145): n is a, c, g, or t
  misc_feature (1154)..(1155): n is a, c, g, or t
  misc_feature (1164)..(1165): n is a, c, g, or t
  misc_feature (1183)..(1183): n is a, c, g, or t
  misc_feature (1189)..(1189): n is a, c, g, or t
  misc_feature (1216)..(1216): n is a, c, g, or t
  misc_feature (1222)..(1223): n is a, c, g, or t
  misc_feature (1226)..(1227): n is a, c, g, or t
  misc_feature (1235)..(1235): n is a, c, g, or t
  misc_feature (1238)..(1238): n is a, c, g, or t
  misc_feature (1245)..(1245): n is a, c, g, or t
  misc_feature (1250)..(1250): n is a, c, g, or t
  misc_feature (1252)..(1253): n is a, c, g, or t
  misc_feature (1255)..(1255): n is a, c, g, or t
  misc_feature (1262)..(1262): n is a, c, g, or t
  misc_feature (1264)..(1264): n is a, c, g, or t
  misc_feature (1269)..(1270): n is a, c, g, or t
  misc_feature (1276)..(1276): n is a, c, g, or t
  misc_feature (1278)..(1279): n is a, c, g, or t
  misc_feature (1298)..(1298): n is a, c, g, or t
  misc_feature (1300)..(1301): n is a, c, g, or t
  misc_feature (1307)..(1309): n is a, c, g, or t
  misc_feature (1311)..(1311): n is a, c, g, or t
  misc_feature (1317)..(1317): n is a, c, g, or t
  misc_feature (1320)..(1320): n is a, c, g, or t
  misc_feature (1322)..(1322): n is a, c, g, or t
naattngagaaattactatgagaggatcgcatcaccatcaccatcacggatcctatttaggtgacactatagaatcgtcgacccacgcgtccgggtgctggccctgcccacgcctagggctccggcgcgtcacgggcctcagctgggattcccgcgcccctcggacggccacgagactcggacatctttccaggaacagcgtgaggaggacagaagcacccaacaggactgctcaagccacctgcgaacactgctgctaccatgcccaagagaaaggcaaaaggagatgctaaaggtgataaagcaaaggtgaaggatgagccacagaggagatcagctcggttgtctgctaaaccagctcctccaaaaccagagcccaggcctaaaaaggcctctgcaaagaagggagagaagcttcccaaagggagaaaggggaaagcagatgctggaaaggatggaaacaaccctgcaaaaaaccgagatgcctctacactccagtcccagaaagcggaaggcactggggatgccaagtgaaatgtacattttttgagagctctgtacttatagtgactctactgtttngaaatactatttttttnaattcaagttttataaaagtgtanaantttggcttttttaagttatgttgttagcacacaggacacttccttgttgtctttttgtggaagggcaagtaccactaatagggtgtatctcaaaaactganttgaaataagggaaaataggattttctgtcctggnttttngaanattgttcttgattnccntngattcccaggananattntctganatttcncgtgtncanccnctttnggacnggaancctttaagtgtgggggnancnaaaattttttgtctcctcttttccngatgncntnannataaanttnnnttncttnaaccgananttttnttngggcnttggcaaccntaaaatncnctntggttngggaannaaaacnnngggtttttnttttnaanntcccaantggggttccnttnaaaaanccaaaattcccgtttttnnntttggggaattcncccgnggggtttttttttnanccccccccgggcaaaaggggnccngaaaaaaantttnancttgcccnnnngngaaggtntcccccccnnttttaaaanntttttttttttaaaaaanaaaaanaaatttttttttattttttttggggantttttnnggnngggggttnggnaattttnaaaangnntnaaaattntnccccnntttccncnnaaaaaatttttttttaaantnntttaannngnaaaaanttntn

SEQ ID NO: 121 - DNA, 1307 bp, Homo Sapiens
  misc_feature (832)..(832): n is a, c, g, or t
  misc_feature (853)..(853): n is a, c, g, or t
  misc_feature (905)..(905): n is a, c, g, or t
  misc_feature (907)..(907): n is a, c, g, or t
  misc_feature (917)..(917): n is a, c, g, or t
  misc_feature (919)..(919): n is a, c, g, or t
  misc_feature (953)..(953): n is a, c, g, or t
  misc_feature (969)..(969): n is a, c, g, or t
  misc_feature (971)..(971): n is a, c, g, or t
  misc_feature (1018)..(1018): n is a, c, g, or t
  misc_feature (1020)..(1020): n is a, c, g, or t
  misc_feature (1022)..(1022): n is a, c, g, or t
  misc_feature (1025)..(1025): n is a, c, g, or t
  misc_feature (1027)..(1027): n is a, c, g, or t
  misc_feature (1038)..(1038): n is a, c, g, or t
  misc_feature (1047)..(1047): n is a, c, g, or t
  misc_feature (1058)..(1058): n is a, c, g, or t
  misc_feature (1066)..(1066): n is a, c, g, or t
  misc_feature (1069)..(1069): n is a, c, g, or t
  misc_feature (1071)..(1071): n is a, c, g, or t
  misc_feature (1077)..(1079): n is a, c, g, or t
  misc_feature (1086)..(1086): n is a, c, g, or t
  misc_feature (1088)..(1088): n is a, c, g, or t
  misc_feature (1117)..(1117): n is a, c, g, or t
  misc_feature (1130)..(1130): n is a, c, g, or t
  misc_feature (1141)..(1141): n is a, c, g, or t
  misc_feature (1144)..(1144): n is a, c, g, or t
  misc_feature (1151)..(1151): n is a, c, g, or t
  misc_feature (1153)..(1153): n is a, c, g, or t
  misc_feature (1168)..(1168): n is a, c, g, or t
  misc_feature (1173)..(1173): n is a, c, g, or t
  misc_feature (1179)..(1179): n is a, c, g, or t
  misc_feature (1184)..(1184): n is a, c, g, or t
  misc_feature (1192)..(1192): n is a, c, g, or t
  misc_feature (1195)..(1195): n is a, c, g, or t
  misc_feature (1209)..(1209): n is a, c, g, or t
  misc_feature (1223)..(1223): n is a, c, g, or t
  misc_feature (1226)..(1226): n is a, c, g, or t
  misc_feature (1229)..(1229): n is a, c, g, or t
  misc_feature (1239)..(1241): n is a, c, g, or t
  misc_feature (1249)..(1250): n is a, c, g, or t
  misc_feature (1254)..(1254): n is a, c, g, or t
  misc_feature (1262)..(1262): n is a, c, g, or t
  misc_feature (1267)..(1267): n is a, c, g, or t
  misc_feature (1274)..(1274): n is a, c, g, or t
  misc_feature (1282)..(1282): n is a, c, g, or t
  misc_feature (1290)..(1290): n is a, c, g, or t
agaaattactatgagaggatcgcatcaccatcaccatcacggatcctatttaggtgacactatagaatcgtcgacccacgcgtccgccgggcccgagcggatcgcgggctcgggctgcggggctccggctgcgggcgctgggccgcgaggcgcggagcttgggagcggagcccaggccgtgccgcgcggcgccatgaagggcaaggaggagaaggagggcggcgcacggctgggcgctggcggcggaagccccgagaagagcccgagcgcgcaggagctcaaggagcagggcaatcgtctgttcgtgggccgaaagtacccggaggcggcggcctgctacggccgcgcgatcacccggaacccgctggtggccgtgtattacaccaaccgggccttgtgctacctgaagatgcagcagcacgagcaggccctggccgactgccggcgcgccctggagctggacgggcagtctgtgaaggcgcacttcttcctggggcagtgccagctggagatggagagctatgatgaggccatcgccaatctgcagcgagcttacagcctggccaaggagcagcggctgaacttcggggacgacatccccagcgctcttcgaatcgcgaagaagaagcgctggaacagcattgaggagcggcgcatccaccaggagagcgagctgcactcctacctctccaggctcattgccgcggagcgtgagagggagctggaaaagtgccagcgaaaccacgagggtgatgaggacgacagccacgtccgggcccagcaggcctgcattgaggccaagcacgacaagtacatggcggacatggacgancttttttctcaggtggatganaagaggaagaagcgagacatccccgactacttgtgtggcaagatcagctttnanctgatgcggnanccgtgcatcacgcccagtggcatcacctacaacngcaaggacatcgaagnancacctgcagcgtgtggttcattttaacccgtgaccggaacccctgancnanaananctcatccccantttgctatnaagagttattnaccattcnttntnaaatgnnnggtgaanantaataagttcctgccctactggcttctgntcaaggaaccttngcaaaccccgnccnttaaaantnatttctggcccccanccttncccaanttttnttttgaantgnaattttccccccanatcctttttgggcngantcncccttttggnnnaaaaaaanngaanggggtggntaacntttcccnattttttnaaatccgnacaaaaaaaaaaaaaaa

SEQ ID NO: 122 - DNA, 1196 bp, Homo Sapiens
  misc_feature (6)..(6): n is a, c, g, or t
  misc_feature (9)..(10): n is a, c, g, or t
  misc_feature (705)..(705): n is a, c, g, or t
  misc_feature (756)..(756): n is a, c, g, or t
  misc_feature (853)..(853): n is a, c, g, or t
  misc_feature (881)..(881): n is a, c, g, or t
  misc_feature (883)..(883): n is a, c, g, or t
  misc_feature (897)..(897): n is a, c, g, or t
  misc_feature (906)..(906): n is a, c, g, or t
  misc_feature (908)..(908): n is a, c, g, or t
  misc_feature (915)..(915): n is a, c, g, or t
  misc_feature (925)..(925): n is a, c, g, or t
  misc_feature (935)..(935): n is a, c, g, or t
  misc_feature (939)..(939): n is a, c, g, or t
  misc_feature (955)..(955): n is a, c, g, or t
  misc_feature (966)..(966): n is a, c, g, or t
  misc_feature (989)..(989): n is a, c, g, or t
  misc_feature (991)..(991): n is a, c, g, or t
  misc_feature (996)..(996): n is a, c, g, or t
  misc_feature (999)..(999): n is a, c, g, or t
  misc_feature (1002)..(1002): n is a, c, g, or t
  misc_feature (1009)..(1009): n is a, c, g, or t
  misc_feature (1018)..(1018): n is a, c, g, or t
  misc_feature (1026)..(1026): n is a, c, g, or t
  misc_feature (1032)..(1035): n is a, c, g, or t
  misc_feature (1043)..(1043): n is a, c, g, or t
  misc_feature (1057)..(1058): n is a, c, g, or t
  misc_feature (1061)..(1061): n is a, c, g, or t
  misc_feature (1067)..(1067): n is a, c, g, or t
  misc_feature (1069)..(1069): n is a, c, g, or t
  misc_feature (1074)..(1074): n is a, c, g, or t
  misc_feature (1077)..(1077): n is a, c, g, or t
  misc_feature (1084)..(1085): n is a, c, g, or t
  misc_feature (1087)..(1087): n is a, c, g, or t
  misc_feature (1098)..(1098): n is a, c, g, or t
  misc_feature (1103)..(1103): n is a, c, g, or t
  misc_feature (1106)..(1106): n is a, c, g, or t
  misc_feature (1109)..(1109): n is a, c, g, or t
  misc_feature (1115)..(1115): n is a, c, g, or t
  misc_feature (1121)..(1121): n is a, c, g, or t
  misc_feature (1127)..(1127): n is a, c, g, or t
  misc_feature (1131)..(1131): n is a, c, g, or t
  misc_feature (1135)..(1136): n is a, c, g, or t
  misc_feature (1139)..(1139): n is a, c, g, or t
  misc_feature (1141)..(1143): n is a, c, g, or t
  misc_feature (1146)..(1147): n is a, c, g, or t
  misc_feature (1158)..(1158): n is a, c, g, or t
  misc_feature (1160)..(1160): n is a, c, g, or t
  misc_feature (1168)..(1168): n is a, c, g, or t
  misc_feature (1170)..(1170): n is a, c, g, or t
  misc_feature (1175)..(1175): n is a, c, g, or t
  misc_feature (1177)..(1177): n is a, c, g, or t
  misc_feature (1179)..(1180): n is a, c, g, or t
  misc_feature (1183)..(1184): n is a, c, g, or t
  misc_feature (1187)..(1187): n is a, c, g, or t
  misc_feature (1189)..(1190): n is a, c, g, or t
  misc_feature (1192)..(1192): n is a, c, g, or t
  misc_feature (1194)..(1195): n is a, c, g, or t
tagagngannactatgagaggatcgcatcaccatcaccatcacggatcctatttaggtgacactatagaatcgtcgacccacgcgtccgggccttgccccgctctgcagcacagacaggccagatgcatttgtcctttgcctagctactccccaggtagagagtgctcctggtggcctggcaggtctgggcccttctctccctgcccaggttgtccctggagggcagccctcactccctttgggggagaggcagacattgctgcccacagacctgcctctgactcaactgtgtccaccctccctggtccctacccccaagtcacaggtgactcagcagtgaccctgtgtgccaggccagatccaaactgagagggaaggtgtcgtttttacactgctaatgacgagagtggctctttttagctaggcgagtacagacggggcctgggagggggcagagatgttccccaggccctgcctgtggttcctgcctgggccttggctgctgctgtgtgagagctgcatgtgagcctgtgaccgtgagctggggtgagctgggccgcacctaccctggggccccagggagcaggacgctccggggcccagcacgttgccctgggcctgtggccggagtcggagtcctctctcctcctcctggcttttggaaaggcttggctgtgttggggagtctctcttagccctttcangaatttctgttcaggcttcctcctcctcatcagctattttacccatctcanaacgtcctgtgtctccatgtaggagagtggctctctcaaatctctcagggcgtctggttatagggaaacaagtggagcagggacgtggctttaattnggaacactcggctgggctgcttgggganantcttccgtgcgttnttcctctgnanaaaaacnaccacctccntgggcgtcantganaaactccatctaaacntccaaagccanaaaactaggggctcaaaaccaananctggnaanccnccaaccnaaaatgaangccatttnctgaannnnaaaccaancccttttggggggnnacntttttncncaccnaanccccttnntntttcctttttnaaagnccnggngttttnttttcntacccngggnttgnncangnnnaannccggtttttcnanccaaatcntnaaaancnannccnnggnannangnnc

SEQ ID NO: 123 - DNA, 1413 bp, Homo Sapiens
  misc_feature (257)..(257): n is a, c, g, or t
  misc_feature (297)..(297): n is a, c, g, or t
  misc_feature (300)..(300): n is a, c, g, or t
  misc_feature (314)..(314): n is a, c, g, or t
  misc_feature (444)..(444): n is a, c, g, or t
  misc_feature (498)..(498): n is a, c, g, or t
  misc_feature (517)..(517): n is a, c, g, or t
  misc_feature (703)..(703): n is a, c, g, or t
  misc_feature (768)..(768): n is a, c, g, or t
  misc_feature (807)..(808): n is a, c, g, or t
  misc_feature (810)..(812): n is a, c, g, or t
  misc_feature (814)..(815): n is a, c, g, or t
  misc_feature (817)..(817): n is a, c, g, or t
  misc_feature (821)..(823): n is a, c, g, or t
  misc_feature (825)..(825): n is a, c, g, or t
  misc_feature (830)..(831): n is a, c, g, or t
  misc_feature (833)..(837): n is a, c, g, or t
  misc_feature (842)..(843): n is a, c, g, or t
  misc_feature (846)..(850): n is a, c, g, or t
  misc_feature (852)..(855): n is a, c, g, or t
  misc_feature (862)..(862): n is a, c, g, or t
  misc_feature (867)..(867): n is a, c, g, or t
  misc_feature (870)..(870): n is a, c, g, or t
  misc_feature (874)..(874): n is a, c, g, or t
  misc_feature (880)..(880): n is a, c, g, or t
  misc_feature (886)..(886): n is a, c, g, or t
  misc_feature (898)..(898): n is a, c, g, or t
  misc_feature (911)..(911): n is a, c, g, or t
  misc_feature (929)..(929): n is a, c, g, or t
  misc_feature (934)..(934): n is a, c, g, or t
  misc_feature (936)..(937): n is a, c, g, or t
  misc_feature (939)..(940): n is a, c, g, or t
  misc_feature (951)..(951): n is a, c, g, or t
  misc_feature (962)..(962): n is a, c, g, or t
  misc_feature (968)..(968): n is a, c, g, or t
  misc_feature (982)..(982): n is a, c, g, or t
  misc_feature (984)..(984): n is a, c, g, or t
  misc_feature (997)..(997): n is a, c, g, or t
  misc_feature (1001)..(1002): n is a, c, g, or t
  misc_feature (1007)..(1007): n is a, c, g, or t
  misc_feature (1018)..(1018): n is a, c, g, or t
  misc_feature (1034)..(1034): n is a, c, g, or t
  misc_feature (1036)..(1036): n is a, c, g, or t
  misc_feature (1039)..(1042): n is a, c, g, or t
  misc_feature (1046)..(1046): n is a, c, g, or t
  misc_feature (1050)..(1050): n is a, c, g, or t
  misc_feature (1072)..(1073): n is a, c, g, or t
  misc_feature (1079)..(1079): n is a, c, g, or t
  misc_feature (1087)..(1087): n is a, c, g, or t
  misc_feature (1091)..(1094): n is a, c, g, or t
  misc_feature (1102)..(1102): n is a, c, g, or t
  misc_feature (1105)..(1107): n is a, c, g, or t
  misc_feature (1122)..(1122): n is a, c, g, or t
  misc_feature (1124)..(1124): n is a, c, g, or t
  misc_feature (1127)..(1127): n is a, c, g, or t
  misc_feature (1132)..(1134): n is a, c, g, or t
  misc_feature (1139)..(1139): n is a, c, g, or t
  misc_feature (1143)..(1143): n is a, c, g, or t
  misc_feature (1148)..(1150): n is a, c, g, or t
  misc_feature (1155)..(1155): n is a, c, g, or t
  misc_feature (1159)..(1159): n is a, c, g, or t
  misc_feature (1163)..(1165): n is a, c, g, or t
  misc_feature (1167)..(1167): n is a, c, g, or t
  misc_feature (1170)..(1171): n is a, c, g, or t
  misc_feature (1191)..(1191): n is a, c, g, or t
  misc_feature (1202)..(1204): n is a, c, g, or t
  misc_feature (1213)..(1213): n is a, c, g, or t
  misc_feature (1215)..(1215): n is a, c, g, or t
  misc_feature (1217)..(1217): n is a, c, g, or t
  misc_feature (1228)..(1228): n is a, c, g, or t
  misc_feature (1231)..(1232): n is a, c, g, or t
  misc_feature (1238)..(1238): n is a, c, g, or t
  misc_feature (1244)..(1244): n is a, c, g, or t
  misc_feature (1247)..(1247): n is a, c, g, or t
  misc_feature (1251)..(1251): n is a, c, g, or t
  misc_feature (1257)..(1257): n is a, c, g, or t
  misc_feature (1259)..(1261): n is a, c, g, or t
  misc_feature (1274)..(1274): n is a, c, g, or t
  misc_feature (1278)..(1278): n is a, c, g, or t
  misc_feature (1282)..(1282): n is a, c, g, or t
  misc_feature (1284)..(1284): n is a, c, g, or t
  misc_feature (1288)..(1288): n is a, c, g, or t
  misc_feature (1291)..(1291): n is a, c, g, or t
  misc_feature (1300)..(1300): n is a, c, g, or t
  misc_feature (1316)..(1316): n is a, c, g, or t
  misc_feature (1321)..(1321): n is a, c, g, or t
  misc_feature (1323)..(1323): n is a, c, g, or t
  misc_feature (1325)..(1327): n is a, c, g, or t
  misc_feature (1333)..(1333): n is a, c, g, or t
  misc_feature (1337)..(1337): n is a, c, g, or t
  misc_feature (1342)..(1342): n is a, c, g, or t
  misc_feature (1347)..(1347): n is a, c, g, or t
  misc_feature (1352)..(1352): n is a, c, g, or t
  misc_feature (1355)..(1355): n is a, c, g, or t
  misc_feature (1358)..(1358): n is a, c, g, or t
  misc_feature (1365)..(1365): n is a, c, g, or t
  misc_feature (1368)..(1368): n is a, c, g, or t
  misc_feature (1371)..(1372): n is a, c, g, or t
  misc_feature (1379)..(1380): n is a, c, g, or t
  misc_feature (1383)..(1383): n is a, c, g, or t
  misc_feature (1386)..(1386): n is a, c, g, or t
  misc_feature (1397)..(1397): n is a, c, g, or t
  misc_feature (1405)..(1406): n is a, c, g, or t
  misc_feature (1409)..(1409): n is a, c, g, or t
  misc_feature (1412)..(1413): n is a, c, g, or t
tagagaaattactatgagaggatcgcatcaccatcaccatcacggatcctatttaggtgacactatagaatcgtcgacccacgcgtccgcccacgcgtccgccacaggctctccttgtggggtcccaggtcctgctgccaagagcccctcaagagaagggctgaacctggggagatgtcactgccagggtgaggtggagccacatggcagggacaatgccggcagcctgagcccaggcaccccagtgcccgctgggnccagcctggggacagggaacctgccgggctcacagtgtgngancagctggacaccangcttcttggtgaaccggcgaggggccgagtcccgcctggtgggcatttgccgccgcctccccaccaccagtcactgcctcgcagagccctacactcccgcagccgctcctcagaggcctgtgcccatcgnaggcctgggaggaaagtgggcgcatagccctcctgctcacacagctgctgaganttcagggacccatcagaanttggtgcagcacagccccgcccgtggagggtcccttttacgcaccccaaggcccacacctaagcttccatgtagccctcatccagggaagttttgcgatcctttaggaagacactgtcctcttattacagattgtgtatttccgtaggcttcttagtagcagctttgtacactgaggacactgtanccaggaacctgtgcatgccacccaccgcctggacaggcagtcatcctgcctctgatgtgaatcangcccattaaagacgtctgggttttgaaaaaaaaaaaaannannnanntnaaannnanaattnncnnnnntttcnntannnnnannnntaagggnggccnctncccnatagtnagtcgnattaaacttaantaactgaccttgnattctgttgaaaaatccnttaangnncnnaaaactccttntggattttttnaaaaanccttggttttcccncngggggtttttttnttgnnaaaantcaaacttaantttggggaaaattttncnggnnnntaanaaanctaaaatggaaaaaaaaaatcnngggaantccccccntttnnnntccccaanggnnncaaaaaaaatttttnanggnttttnnnatttnccanggacnnnaacanaaangttnnncnganntaagccctttttaaaaaccnaaaaaaaaaannnaaatttttncngnttttttcattnttnncccccnaaaaanctncccnaatttntnnngaaaaaaaaaggnatgnaaangnaaanttncccttttanctttcaaaaaaaaaanttttncntnnnaaaaanaaanttcgnttttnaaaanttnaantgggttnggnaannccttttnnagnttnaatttttcccnccggtttnnttntann

SEQ ID NO: 124 - DNA, 893 bp, Homo Sapiens
gaattaactatgagaggtcgcatcaccatcaccatcacggatcctatttaggtgacactatagaatcgtcgacccacgcgtccgcagacacggaccccgcaggagatgggtgcccccatccgcacactgtcctttggccaccggacatcatgcctcccaagaaggatgttcccgtgaagaaaccagcagggccctccatctccaaacctgctgctaagccagcagcagcaggggctcctccagccaagaccaaagctgagccagctgtcccccaggcccctcagaaaacccaggagcctccagtcgatctctccaaagtggtgatcgagtttaacaaggaccagctggaggagttcaaggaggccttcgagctgtttgaccgagtgggggatggcaagatcctgtacagccagtgtggggacgtgatgagggccctgggccagaaccccaccaacgccgaggtgctcaaggtcctggggaaccccaagagtgatgagctgaagtcgcggcgtgtggactttgagactttcctgcccatgctccaggcagtggccaagaaccgaggccaaggcacatatgaggactacttggaggggtttcgtgtgtttgacaaggaggggaacggcaaagtcatgggagcagagctcagacatgttctcaccacccttggagagaagatgactgaggaggaggtggagaccgttctggcaggacacgaggacagcaacggctgcatcaactacgaggccttcttgaaacacatcctaagcgtctgagtgctgcagatccagtggggtccggacactgggccccgcaggcgaaagcacgttccagccaccaggaggccacctattgtttcaaaataaagactgggttcctctcttaaaaacaaa

SEQ ID NO: 125 - DNA, 750 bp, Homo Sapiens
  misc_feature (750)..(750): n is a, c, g, or t
agagagattactatgagaggatcgcatcaccatcaccatcacggatcctatttaggtgacactatagaatcgtcgacccacgcgtccgggacaagcccacgtggggtcctccctgcgtgctcagagggtctgtccagccctgggaagcgaccttggcctcagttcacagcctggtgctcatctgctggcaccgggcatccacccatcagcccccgccctgtccctccgaaggacacccagcaggcaccccccggggaggcaggggcagaggtcagaaggggtgtctgggacctggatggccagcagggacaggggcattgtcatctcaaaggcccaacccccagaggccacaccagtcctcccagggagtcctcgagtcgccctgcccagagccctggcaccagagacgccaagagcctgtggggtgactcggagcagcaggtgtggccccgggcgggcggcaccgcgtccagggcagcctccctccgctgagtgacacgggacaccagtgcccggccgacgcgcctttgcaggagaaatgtgcaaacctctgtggataccatttcatttccattcttgtgttgtctccaaggcccttttggagatatacttggtgttggttgtgttttttggttccttttcagagaactgtaaaccgaggctgacgtgctccactgactgtgccgaggggcgggggcaggaggacggcaagacctatttataatatttagcgaactcggtctccctcan

SEQ ID NO: 126 - DNA, 1407 bp, Homo Sapiens
  misc_feature (2)..(2): n is a, c, g, or t
  misc_feature (929)..(929): n is a, c, g, or t
  misc_feature (941)..(941): n is a, c, g, or t
  misc_feature (954)..(954): n is a, c, g, or t
  misc_feature (959)..(959): n is a, c, g, or t
  misc_feature (964)..(964): n is a, c, g, or t
  misc_feature (966)..(966): n is a, c, g, or t
  misc_feature (968)..(968): n is a, c, g, or t
  misc_feature (971)..(971): n is a, c, g, or t
  misc_feature (987)..(987): n is a, c, g, or t
  misc_feature (1002)..(1002): n is a, c, g, or t
  misc_feature (1024)..(1024): n is a, c, g, or t
  misc_feature (1026)..(1028): n is a, c, g, or t
  misc_feature (1050)..(1050): n is a, c, g, or t
  misc_feature (1054)..(1054): n is a, c, g, or t
  misc_feature (1058)..(1058): n is a, c, g, or t
  misc_feature (1060)..(1060): n is a, c, g, or t
  misc_feature (1074)..(1074): n is a, c, g, or t
  misc_feature (1085)..(1085): n is a, c, g, or t
  misc_feature (1096)..(1096): n is a, c, g, or t
  misc_feature (1101)..(1101): n is a, c, g, or t
  misc_feature (1110)..(1110): n is a, c, g, or t
  misc_feature (1113)..(1113): n is a, c, g, or t
  misc_feature (1116)..(1116): n is a, c, g, or t
  misc_feature (1120)..(1120): n is a, c, g, or t
  misc_feature (1125)..(1125): n is a, c, g, or t
  misc_feature (1128)..(1129): n is a, c, g, or t
  misc_feature (1131)..(1131): n is a, c, g, or t
  misc_feature (1136)..(1136): n is a, c, g, or t
  misc_feature (1142)..(1142): n is a, c, g, or t
  misc_feature (1144)..(1144): n is a, c, g, or t
  misc_feature (1148)..(1148): n is a, c, g, or t
  misc_feature (1155)..(1156): n is a, c, g, or t
  misc_feature (1158)..(1158): n is a, c, g, or t
  misc_feature (1163)..(1163): n is a, c, g, or t
  misc_feature (1166)..(1166): n is a, c, g, or t
  misc_feature (1170)..(1170): n is a, c, g, or t
  misc_feature (1173)..(1173): n is a, c, g, or t
  misc_feature (1179)..(1179): n is a, c, g, or t
  misc_feature (1181)..(1182): n is a, c, g, or t
  misc_feature (1187)..(1187): n is a, c, g, or t
  misc_feature (1194)..(1194): n is a, c, g, or t
  misc_feature (1196)..(1196): n is a, c, g, or t
  misc_feature (1200)..(1200): n is a, c, g, or t
  misc_feature (1205)..(1205): n is a, c, g, or t
  misc_feature (1218)..(1219): n is a, c, g, or t
  misc_feature (1221)..(1221): n is a, c, g, or t
  misc_feature (1224)..(1224): n is a, c, g, or t
  misc_feature (1233)..(1233): n is a, c, g, or t
  misc_feature (1237)..(1238): n is a, c, g, or t
  misc_feature (1242)..(1242): n is a, c, g, or t
  misc_feature (1247)..(1247): n is a, c, g, or t
  misc_feature (1249)..(1251): n is a, c, g, or t
  misc_feature (1255)..(1255): n is a, c, g, or t
  misc_feature (1257)..(1257): n is a, c, g, or t
  misc_feature (1259)..(1260): n is a, c, g, or t
  misc_feature (1262)..(1262): n is a, c, g, or t
  misc_feature (1267)..(1267): n is a, c, g, or t
  misc_feature (1272)..(1274): n is a, c, g, or t
  misc_feature (1277)..(1277): n is a, c, g, or t
  misc_feature (1279)..(1279): n is a, c, g, or t
  misc_feature (1281)..(1281): n is a, c, g, or t
  misc_feature (1283)..(1283): n is a, c, g, or t
  misc_feature (1285)..(1285): n is a, c, g, or t
  misc_feature (1288)..(1290): n is a, c, g, or t
  misc_feature (1292)..(1292): n is a, c, g, or t
  misc_feature (1297)..(1297): n is a, c, g, or t
  misc_feature (1303)..(1303): n is a, c, g, or t
  misc_feature (1306)..(1313): n is a, c, g, or t
  misc_feature (1316)..(1317): n is a, c, g, or t
  misc_feature (1319)..(1321): n is a, c, g, or t
  misc_feature (1323)..(1327): n is a, c, g, or t
  misc_feature (1333)..(1334): n is a, c, g, or t
  misc_feature (1336)..(1336): n is a, c, g, or t
  misc_feature (1338)..(1338): n is a, c, g, or t
  misc_feature (1340)..(1342): n is a, c, g, or t
  misc_feature (1346)..(1348): n is a, c, g, or t
  misc_feature (1350)..(1352): n is a, c, g, or t
  misc_feature (1357)..(1363): n is a, c, g, or t
  misc_feature (1366)..(1366): n is a, c, g, or t
  misc_feature (1370)..(1373): n is a, c, g, or t
  misc_feature (1383)..(1388): n is a, c, g, or t
  misc_feature (1407)..(1407): n is a, c, g, or t
antagagaaattactatgagaggatcgcatcaccatcaccatcacggatcctatttaggtgacactatagaatcgtcgacccacgcgtccgtgggttctcccgattatggcaactcagccctgctcagcttgcctggctaccgccccaccactcgcagttctgctcgtcgttcccaggccggggtgtccagtggggcccctccaggaaggaacagcttctacatgggcacttgccaggatgagcctgagcagctggatgactggaaccgcattgcagagctgcagcagcgcaatcgagtgtgccccccacatctgaagacctgctatcccctggagtccaggccttccctgagcctgggcaccatcacagatgaggagatgaaaactggagacccccaagagaccctgcgccgagccagcatgcagccaatccagatagccgagggcactggcatcaccacccggcagcagcgcaaacgggtctccctagagccccaccagggccctggaactcctgagtctaagaaggccaccagctgtttcccacgccccatgactccccgagaccgacatgaagggcgcaaacagagcactactgaggcccagaagaaagcagctccagcttctactaaacaggctgaccggcgccagtcgatggccttcagcatcctcaacacacccaagaagctagggaacagccttctgcggcggggagcctcaaagaaggccctgtccaaggcttcccccaacactcgcagtggaacccgccgttctccgcgcattgccaccaccacagccagcgccgccactgctgccgccattggtgccacccctcgagccaagggcaaggcaaaagcactaaagggccagtaccagtgagtggccccacctgtgtccccgatgctgccgtcacctggtcctccgcctantgtccctctcantgccttctctcanctccnagccnanantanccaaacccctaaaaanagtgatgcctgcccncaccctggcctggtcctggtcntnnntgggccttttcgaactggccangggnctgnanatgaaaggggggcnctctcctactngcccctttttntaaanaaatccttntcntcnaacnaattnagnngntttanggtggncntggnctggcanntnctttnccnttgnttnaagggncnnaaaanaaagccngnttcngtttntgggggggggccnnanggnccccttttnaatnnaaanggttnannngggnancnncnaaaanttttnnnaanangncntnttnnnanggggngggaanttnnnnnnnnccnntnnnannnnngggggnntngngnnntttnnngnnnttttnnnnnnnaantttnnnnaaaaaaaaannnnnnttttttttttttttttttn

SEQ ID NO: 127 - DNA, 938 bp, Homo Sapiens
gagaggatcgcatcaccatcaccatcacggatcctatttaggtgacactatagaatcgtcgacccacgcgtccgccggccccgccctgggagccccgcagtgcgtcgcgccgctgcccgcatctccgaggcccgcgacgagcggggcctcacgggagctggatgctcggagcagcaaggcggccctgggggccccttccggtcccggggctgacgcctggcggcgtctccgggaacccgcgccctttcaagcgccgctggctcctgtttcacagatggagaccctgaagccccaacaagcagcctccccagcacctcccagtgactgaaaaagctggcactgggcgcccgtctcactctccacccagctcccaggctgccccacgggaccagcacctttggggagagacgagacctgaacaaacgctggggctggatccccagggtgggtcagaacagccgttgccctgaaagctggcccggacagatgcgtgcggggcgtgccaccggagctccttccagcttgcgtctggggccaccatgtcccttcctcagggcactggatccatctcttcaagctcagtggtccaggccatggtggcagaatcaccccccagggtgtgacgcctcgtccctgtcaattccacacagctgcacccggaagagctgtggccgggcgccgctctgacctgtgtgcggtcccctgaatgggtctcaggtgtcttcagaatgctgtgcaagttcattcgcaaacgtcctagaagtggaactgctgggtcaaagtgcattccccaaatgtcctgccagaggcctggtcggcagcagcctcctgcacagcccgagtcccttctgcgagagtcctggcttgtttgcagcctgcagctgggagatttgaagtcagacttcccaggattgccgcatggaagctgcagagggagt

SEQ ID NO: 128 - DNA, 786 bp, Homo Sapiens
aactatgagaggatcgcatcaccatcaccatcacggatcctatttaggtgacactatagaatcgtcgacccacgcgtccgcgtttcccctactacctctcccggcaccggctgagccactcggggctccggccccacgcctgcccgctgtgccccaaggccttccgccggccggcccacctttcccgccacctgcgcggccacgggccccagcccccgctgcgctgcgccgcctgcccccgcaccttcccagaaccggcccagctcaggcgccacctggctcaggagcacgcgggcggcgaggtcgagctggccatcgagagggtggccaaggagacggccgaacccagctggggcccgcaggacgagggctcggagccgcccaccaccgctgcagcaggggccacggaggaggaggcggtcgcagcgtggcctgagacgtggcctgcgggggagccttccacgctggctgcgcccaccagcgccgcggagccccgggagtcggagtcggaggaggccgaggccggggcagcagagctgagggccgagctggcgctggcggccgggcggcaggaggagaaacaggtcctgctccaggcagactggacgctgctgtgtctgcgctgccgcgaagccttcgccaccaagggcgagctcaaggcgcacccgtgtctgcgccccgagggcgaacaggaaggggaaggggggcccccgccacgccccaagcgacaccagtgctccatctgcctcaaggccttcgccaggccctggtcccctgtcgcgccac

SEQ ID NO: 129 - DNA, 936 bp, Homo Sapiens
ttaactatgagaggatcgcatcaccatcaccatcacggatcctatttaggtgacactatagaatcgtcgacccacgcgtccgggccttcgggcagagctcggcgctgctgcagcaccagcgcacacacacggccgagcgcccctaccgctgcccccactgcggcaaagccttcgggcagagctccaacttgcaacaccacctgcgcatccacacgggcgagcggccctacgcctgcccgcactgctccaaggccttcggccagagctcagcgctgctccagcacctgcacgtgcattcgggcgagcgtccctatcgctgtcagctctgcgggaaggccttcggccaggcctccagcctcaccaagcacaaacgggtgcatgagggtgcagccgctgctgcagctgccgcggccgctccctatagtgagtcgtattaagcttaattagctgagcttggactcctgttgatagatccagtaatgacctcagaactccatctggatttgttcagaacgctcggttgccgccgggcgttttttattggtgagaatccaagctagcttggcgagattttcaggagctaaggaagctaaaatggagaaaaaaatcactggatataccaccgttgatatatcccaatggcatcgtaaagaacattttgaggcatttcagtcagttgctcaatgtacctataaccagaccgttcagctggatattacggcctttttaaagaccgtaaagaaaaataagcacaagttttatccggcctttattcacattcttgcccgcctgatgaatgctcatccggaatttcgtatggcaatgaaagacggtgagctggtgatatgggatagtgttcacccttgttacaccgttttccatgagcaaaactgaaacgttttcatcgctctggagtgaataccacgacgattttcc

SEQ ID NO: 130 - DNA, 1410 bp, Homo Sapiens
  misc_feature (5)..(5): n is a, c, g, or t
  misc_feature (691)..(691): n is a, c, g, or t
  misc_feature (722)..(722): n is a, c, g, or t
  misc_feature (817)..(817): n is a, c, g, or t
  misc_feature (819)..(819): n is a, c, g, or t
  misc_feature (832)..(832): n is a, c, g, or t
  misc_feature (893)..(893): n is a, c, g, or t
  misc_feature (897)..(897): n is a, c, g, or t
  misc_feature (904)..(904): n is a, c, g, or t
  misc_feature (943)..(943): n is a, c, g, or t
  misc_feature (957)..(957): n is a, c, g, or t
  misc_feature (962)..(962): n is a, c, g, or t
  misc_feature (964)..(964): n is a, c, g, or t
  misc_feature (971)..(971): n is a, c, g, or t
  misc_feature (976)..(976): n is a, c, g, or t
  misc_feature (978)..(979): n is a, c, g, or t
  misc_feature (990)..(990): n is a, c, g, or t
  misc_feature (1001)..(1001): n is a, c, g, or t
  misc_feature (1008)..(1008): n is a, c, g, or t
  misc_feature (1014)..(1014): n is a, c, g, or t
  misc_feature (1021)..(1021): n is a, c, g, or t
  misc_feature (1035)..(1035): n is a, c, g, or t
  misc_feature (1050)..(1050): n is a, c, g, or t
  misc_feature (1065)..(1066): n is a, c, g, or t
  misc_feature (1068)..(1068): n is a, c, g, or t
  misc_feature (1075)..(1075): n is a, c, g, or t
  misc_feature (1079)..(1079): n is a, c, g, or t
  misc_feature (1089)..(1089): n is a, c, g, or t
  misc_feature (1095)..(1095): n is a, c, g, or t
  misc_feature (1104)..(1104): n is a, c, g, or t
  misc_feature (1117)..(1118): n is a, c, g, or t
  misc_feature (1122)..(1122): n is a, c, g, or t
  misc_feature (1125)..(1125): n is a, c, g, or t
  misc_feature (1137)..(1137): n is a, c, g, or t
  misc_feature (1141)..(1141): n is a, c, g, or t
  misc_feature (1143)..(1143): n is a, c, g, or t
  misc_feature (1149)..(1149): n is a, c, g, or t
  misc_feature (1157)..(1157): n is a, c, g, or t
  misc_feature (1168)..(1168): n is a, c, g, or t
  misc_feature (1170)..(1170): n is a, c, g, or t
  misc_feature (1175)..(1176): n is a, c, g, or t
  misc_feature (1191)..(1191): n is a, c, g, or t
  misc_feature (1195)..(1195): n is a, c, g, or t
  misc_feature (1199)..(1199): n is a, c, g, or t
  misc_feature (1209)..(1209): n is a, c, g, or t
  misc_feature (1212)..(1213): n is a, c, g, or t
  misc_feature (1215)..(1215): n is a, c, g, or t
  misc_feature (1218)..(1218): n is a, c, g, or t
  misc_feature (1222)..(1222): n is a, c, g, or t
  misc_feature (1232)..(1232): n is a, c, g, or t
  misc_feature (1234)..(1234): n is a, c, g, or t
  misc_feature (1244)..(1244): n is a, c, g, or t
  misc_feature (1250)..(1250): n is a, c, g, or t
  misc_feature (1266)..(1266): n is a, c, g, or t
  misc_feature (1268)..(1268): n is a, c, g, or t
  misc_feature (1273)..(1276): n is a, c, g, or t
  misc_feature (1284)..(1286): n is a, c, g, or t
  misc_feature (1288)..(1288): n is a, c, g, or t
  misc_feature (1292)..(1293): n is a, c, g, or t
  misc_feature (1295)..(1296): n is a, c, g, or t
  misc_feature (1298)..(1298): n is a, c, g, or t
  misc_feature (1309)..(1309): n is a, c, g, or t
  misc_feature (1313)..(1314): n is a, c, g, or t
  misc_feature (1317)..(1317): n is a, c, g, or t
  misc_feature (1321)..(1321): n is a, c, g, or t
  misc_feature (1323)..(1324): n is a, c, g, or t
  misc_feature (1326)..(1326): n is a, c, g, or t
  misc_feature (1328)..(1329): n is a, c, g, or t
  misc_feature (1331)..(1332): n is a, c, g, or t
  misc_feature (1336)..(1337): n is a, c, g, or t
  misc_feature (1343)..(1343): n is a, c, g, or t
  misc_feature (1348)..(1350): n is a, c, g, or t
  misc_feature (1352)..(1352): n is a, c, g, or t
  misc_feature (1360)..(1361): n is a, c, g, or t
  misc_feature (1365)..(1368): n is a, c, g, or t
  misc_feature (1379)..(1379): n is a, c, g, or t
  misc_feature (1382)..(1382): n is a, c, g, or t
  misc_feature (1385)..(1385): n is a, c, g, or t
  misc_feature (1390)..(1390): n is a, c, g, or t
  misc_feature (1393)..(1393): n is a, c, g, or t
  misc_feature (1396)..(1400): n is a, c, g, or t
  misc_feature (1402)..(1403): n is a, c, g, or t
  misc_feature (1407)..(1409): n is a, c, g, or t
gaganaattactatgagaggatcgcatcaccatcaccatcacggatcctatttaggtgacactatagaatcgtcgacccacgcgtccgcaacgagccatcttggtaactgggaacaaacacaccccaccccgtttttccttaaaagaggccttaatccccgagcccccgctgccagggcagagggaggagggggcacagctgtgccaagcccggccccactggtgtgtcctcacaatgtgaccccagaaatgccagcagggaacggaggctgctgcagagacgcagccccaggcagccggggctcctaggctggtgcagatggtggggttaaacgggctgagcgttccaggtaaactgaggctcggggaggggaaggacaggctggcctctccttcactgtccacagggccttgggttccctgagctgtccagaccccaccatctcccggaccccagggaggtggccattgccagaagcctgtgggtttctttctagcttgggggattaaaaaaaaaattctccacttttttttttcttgagtagacttcagtgaccacactgtggaaaatacctttgcagacgtggcacccgagtgcacacaccgaccgccacatgtgcttttctgccgggaatccctggggtgaacgcatgttttatgggcgtttccaggagcgcgcgtgcacctccanacggggagctggcgggcgggggtggcagcancagctctagccttggggggacaagcctctctcagctacgccaggggaaaaagagagttaaggacactcacccccacccacgcacacacacaaggnancgtcgggtggganaaaaaaaggccgtttctccttctgtagcctgggtctcccacgggccttccccgctgctgancganacaccantagccaggtgaagggccacagcgggccaggccccgaccntgttgtgacccacntgggnanctttccnggaananntccgcctcccntgccctccttnttccagnaaggancaaaaanctttacccttttcnaaccttcccaggggntaaccccaggccaanncnaaaaaancttnactgcaaccnctggcntttgggaanataaacgggccgnntggnccnagggcgaaaggncccngntttccnccttcggnggggccctttnangggcnncccccgttccaaagnccancttngccccagccnccnncnttncaantaaaaccccncngcccaatttngggagnaaaaaggccccacccntnccccnnnnaacggggnnncngggnngnnanccccccttccngggnnttnaaancnngngnngnncccnnaaaaanatggnnncncccctttnnaaannnntaattaaaaanttnttnccccnggnaannnnncnngagnnnt

SEQ ID NO: 131 - DNA, 1407 bp, Homo Sapiens
  misc_feature (903)..(903): n is a, c, g, or t
  misc_feature (933)..(933): n is a, c, g, or t
  misc_feature (966)..(966): n is a, c, g, or t
  misc_feature (993)..(993): n is a, c, g, or t
  misc_feature (999)..(999): n is a, c, g, or t
  misc_feature (1013)..(1013): n is a, c, g, or t
  misc_feature (1021)..(1021): n is a, c, g, or t
  misc_feature (1024)..(1024): n is a, c, g, or t
  misc_feature (1030)..(1030): n is a, c, g, or t
  misc_feature (1033)..(1033): n is a, c, g, or t
  misc_feature (1042)..(1042): n is a, c, g, or t
  misc_feature (1050)..(1050): n is a, c, g, or t
  misc_feature (1054)..(1054): n is a, c, g, or t
  misc_feature (1073)..(1073): n is a, c, g, or t
  misc_feature (1082)..(1082): n is a, c, g, or t
  misc_feature (1102)..(1102): n is a, c, g, or t
  misc_feature (1114)..(1115): n is a, c, g, or t
  misc_feature (1117)..(1117): n is a, c, g, or t
  misc_feature (1120)..(1120): n is a, c, g, or t
  misc_feature (1138)..(1138): n is a, c, g, or t
  misc_feature (1143)..(1143): n is a, c, g, or t
  misc_feature (1148)..(1149): n is a, c, g, or t
  misc_feature (1152)..(1152): n is a, c, g, or t
  misc_feature (1161)..(1161): n is a, c, g, or t
  misc_feature (1165)..(1166): n is a, c, g, or t
  misc_feature (1168)..(1168): n is a, c, g, or t
  misc_feature (1171)..(1171): n is a, c, g, or t
  misc_feature (1178)..(1178): n is a, c, g, or t
  misc_feature (1183)..(1183): n is a, c, g, or t
  misc_feature (1196)..(1197): n is a, c, g, or t
  misc_feature (1201)..(1201): n is a, c, g, or t
  misc_feature (1207)..(1207): n is a, c, g, or t
  misc_feature (1210)..(1210): n is a, c, g, or t
  misc_feature (1212)..(1212): n is a, c, g, or t
  misc_feature (1214)..(1216): n is a, c, g, or t
  misc_feature (1219)..(1219): n is a, c, g, or t
  misc_feature (1242)..(1242): n is a, c, g, or t
  misc_feature (1246)..(1246): n is a, c, g, or t
  misc_feature (1251)..(1251): n is a, c, g, or t
  misc_feature (1256)..(1258): n is a, c, g, or t
  misc_feature (1262)..(1262): n is a, c, g, or t
  misc_feature (1265)..(1265): n is a, c, g, or t
  misc_feature (1267)..(1267): n is a, c, g, or t
  misc_feature (1277)..(1277): n is a, c, g, or t
  misc_feature (1284)..(1284): n is a, c, g, or t
  misc_feature (1299)..(1300): n is a, c, g, or t
  misc_feature (1302)..(1303): n is a, c, g, or t
  misc_feature (1305)..(1305): n is a, c, g, or t
  misc_feature (1313)..(1313): n is a, c, g, or t
  misc_feature (1324)..(1325): n is a, c, g, or t
  misc_feature (1346)..(1346): n is a, c, g, or t
  misc_feature (1353)..(1356): n is a, c, g, or t
  misc_feature (1359)..(1359): n is a, c, g, or t
  misc_feature (1373)..(1373): n is a, c, g, or t
  misc_feature (1384)..(1385): n is a, c, g, or t
  misc_feature (1389)..(1390): n is a, c, g, or t
  misc_feature (1401)..(1401): n is a, c, g, or t
  misc_feature (1403)..(1403): n is a, c, g, or t
  misc_feature (1405)..(1406): n is a, c, g, or t
attagagaaattactatgagaggatcgcatcaccatcaccatcacggatcctatttaggtgacactatagaatcgtcgacccacgcgtccgcctgcgtcgctccgggagctgccgacggacggagcgcccccgcccccgcccggccgcccgcccgccgccgccatgcccttctccaacagccacaacgcactgaagctgcgcttcccggccgaggacgagttccccgacctgagcgcccacaacaaccacatggccaaggtgctgacccccgagctgtacgcggagctgcgcgccaagagcacgccgagcggcttcacgctggacgacgtcatccagacaggcgtggacaacccgggccacccgtacatcatgaccgtgggctgcgtggcgggcgacgaggagtcctacgaagtgttcaaggatctcttcgaccccatcatcgaggaccggcacggcggctacaagcccagcgatgagcacaagaccgacctcaaccccgacaacctgcagggcggcgacgacctggaccccaactacgtgctgagctcgcgggtgcgcacgggccgcagcatccgtggcttctgcctccccccgcactgcagccgcggggagcgccgagccatcgagaagctcgcggtggaagccctgtccagcctggacggcgacctggcgggccgatactacgcgctcaagagcatgacggaggcggagcagcagcagctcatcgacgaccacttcctcttcgacaagcccgtgtcgcccctgctgctggcctcgggcatggcccgcgactggcccgacgcccgcggttatctggcacaatgacaataagaaccttcctggtgtgggtcaacgaggaggaaccacctgcgggtcatcttccatgcaaaaaggggggcaanatgaaggaggtgttcacccgcttttgcacnggcctcacccaaaattgaaactctttttaagtnttaagggactatgatttcatgtggaanccttcncctggggttaaatncttcaacntgnccatcnaanctggggcancgggttgngggnaaggtgttgcatataaagnttgcccaancttgggaaaaatttaaaaanttttttggaagnngnttnaagcggttgccaattttnaaaancaggnncanggggggttngaanncnggntgcgggnggggnggggttttttaanntttncaaaanttnancnnnttnggttttttaaaggggaattggtnaaangtggnggaannnaatnaantnttttttaaanaaaaaancggttgaaaaagggnngnntnttaaaaanttttttttttnnaaaaaaaacccggcccaaacnaaaaaannnngtntttttttaattttntgggggggccnnaaannccttatttttncntnng

SEQ ID NO: 132 - DNA, 1417 bp, Homo Sapiens
  misc_feature (730)..(730): n is a, c, g, or t
  misc_feature (732)..(732): n is a, c, g, or t
  misc_feature (735)..(735): n is a, c, g, or t
  misc_feature (742)..(742): n is a, c, g, or t
  misc_feature (801)..(801): n is a, c, g, or t
  misc_feature (854)..(854): n is a, c, g, or t
  misc_feature (874)..(874): n is a, c, g, or t
  misc_feature (876)..(876): n is a, c, g, or t
  misc_feature (893)..(893): n is a, c, g, or t
  misc_feature (926)..(926): n is a, c, g, or t
  misc_feature (937)..(937): n is a, c, g, or t
  misc_feature (948)..(948): n is a, c, g, or t
  misc_feature (951)..(951): n is a, c, g, or t
  misc_feature (955)..(955): n is a, c, g, or t
  misc_feature (957)..(957): n is a, c, g, or t
  misc_feature (965)..(965): n is a, c, g, or t
  misc_feature (968)..(968): n is a, c, g, or t
  misc_feature (971)..(971): n is a, c, g, or t
  misc_feature (977)..(977): n is a, c, g, or t
  misc_feature (979)..(979): n is a, c, g, or t
  misc_feature (982)..(982): n is a, c, g, or t
  misc_feature (989)..(989): n is a, c, g, or t
  misc_feature (996)..(996): n is a, c, g, or t
  misc_feature (999)..(999): n is a, c, g, or t
  misc_feature (1002)..(1002): n is a, c, g, or t
  misc_feature (1005)..(1005): n is a, c, g, or t
  misc_feature (1011)..(1011): n is a, c, g, or t
  misc_feature (1014)..(1014): n is a, c, g, or t
  misc_feature (1054)..(1054): n is a, c, g, or t
  misc_feature (1057)..(1057): n is a, c, g, or t
  misc_feature (1072)..(1072): n is a, c, g, or t
  misc_feature (1076)..(1076): n is a, c, g, or t
  misc_feature (1082)..(1082): n is a, c, g, or t
  misc_feature (1091)..(1091): n is a, c, g, or t
  misc_feature (1096)..(1097): n is a, c, g, or t
  misc_feature (1099)..(1100): n is a, c, g, or t
  misc_feature (1102)..(1102): n is a, c, g, or t
  misc_feature (1114)..(1116): n is a, c, g, or t
  misc_feature (1118)..(1119): n is a, c, g, or t
  misc_feature (1124)..(1126): n is a, c, g, or t
  misc_feature (1130)..(1131): n is a, c, g, or t
  misc_feature (1136)..(1136): n is a, c, g, or t
  misc_feature (1140)..(1142): n is a, c, g, or t
  misc_feature (1149)..(1149): n is a, c, g, or t
  misc_feature (1151)..(1152): n is a, c, g, or t
  misc_feature (1154)..(1154): n is a, c, g, or t
  misc_feature (1159)..(1159): n is a, c, g, or t
  misc_feature (1161)..(1161): n is a, c, g, or t
  misc_feature (1163)..(1164): n is a, c, g, or t
  misc_feature (1166)..(1168): n is a, c, g, or t
  misc_feature (1170)..(1170): n is a, c, g, or t
  misc_feature (1173)..(1175): n is a, c, g, or t
  misc_feature (1177)..(1179): n is a, c, g, or t
  misc_feature (1182)..(1183): n is a, c, g, or t
  misc_feature (1186)..(1187): n is a, c, g, or t
  misc_feature (1189)..(1191): n is a, c, g, or t
  misc_feature (1193)..(1193): n is a, c, g, or t
  misc_feature (1199)..(1199): n is a, c, g, or t
  misc_feature (1201)..(1202): n is a, c, g, or t
  misc_feature (1205)..(1205): n is a, c, g, or t
  misc_feature (1208)..(1208): n is a, c, g, or t
  misc_feature (1220)..(1221): n is a, c, g, or t
  misc_feature (1223)..(1223): n is a, c, g, or t
  misc_feature (1227)..(1230): n is a, c, g, or t
  misc_feature (1233)..(1235): n is a, c, g, or t
  misc_feature (1238)..(1238): n is a, c, g, or t
  misc_feature (1240)..(1240): n is a, c, g, or t
  misc_feature (1245)..(1245): n is a, c, g, or t
  misc_feature (1252)..(1253): n is a, c, g, or t
  misc_feature (1255)..(1256): n is a, c, g, or t
  misc_feature (1263)..(1264): n is a, c, g, or t
  misc_feature (1271)..(1273): n is a, c, g, or t
  misc_feature (1275)..(1282): n is a, c, g, or t
  misc_feature (1285)..(1288): n is a, c, g, or t
  misc_feature (1293)..(1296): n is a, c, g, or t
  misc_feature (1299)..(1299): n is a, c, g, or t
  misc_feature (1302)..(1311): n is a, c, g, or t
  misc_feature (1313)..(1313): n is a, c, g, or t
  misc_feature (1316)..(1319): n is a, c, g, or t
  misc_feature (1323)..(1338): n is a, c, g, or t
  misc_feature (1342)..(1342): n is a, c, g, or t
  misc_feature (1344)..(1344): n is a, c, g, or t
  misc_feature (1347)..(1410): n is a, c, g, or t
  misc_feature (1412)..(1412): n is a, c, g, or t
  misc_feature (1417)..(1417): n is a, c, g, or t
agagaaattactatgagaggatcgcatcaccatcaccatcacggatcctatttaggtgacactatagaatcgtcgacccacgcgtccgctcgtcgccctcagtccggctcagctggggctgggcgccgtgggtctggcggttccgtagcggtcccagcgtctgtcccgccggccgggcggtcgcggcacagccgcgggaaggtgtcggagggcggttccgccgcgcggcgggcgcgccgcccacatggcggccatcagggcgctgcaacagtggtgccggcagcagtgcgagggctaccgcgacgtgaatatctgcaacatgaccacgtcgttccgcgacggcctggctttctgcgccatcctgcaccgccaccggcccgacctcataaacttcagtgctctcaagaaggaaaatatttatgaaaacaataaactggccttccgcgtggccgaggagcacttgggcatcccagccttgctggatgccgaggacatggtggccttgaaggtgcctgaccggctgagcatcttgacctacgtgtcccagtattacaactacttccacggccgctcccccattgggggcatggcaggcgtgaagagggcctcggaggactctgaggaggagccgtcagggaagaaggctccagtccaggcggccaagctgccctcgcccgccccagcccggaagcctccactatctccagcccagacaaaccctgtggtccanangangaatganggtgcagggggcccgccccccaagactgaccaggcattggcgggcagcttggtcagcancacctgcggggtctgcggcaagcacgtgcacctggtacagcggcacctggccnacgggaggctttaccaccgnanctgcttcaggtgtaaancagtgctcctgcacgctgcactcgggggcctanaaggccacagnaaaaccggggnacnttcntntgcacaancanctnccccgnanccncctttgnaaacccnaanttnaanggtttnggncccccaaaaccaagggccatgggtgtggattccaagaacntcntgtttcccaaaaaangccnaaaagnaaaaaggcnaaacnntnncntggaaacctttnnngnnaaatnnnctgnnaaggntttnnntttcaantnnancaaancntnnannnanaannncnnnttnnttnnannnanaaaccnannagnccnttaaaaaacccnngncccnnnnccnnnaangnaaaanccccccnntnnaaaaaanncccaagnnngnnnnnnnnccnnnnaaaannnnttntcnnnnnnnnnncnaannnnaaannnnnnnnnnnnnnnngggnanccnnnnnnnnnnnnnnnnnnnnnnnnnnnnnnnnnnnnnnnnnnnnnnnnnnnnnnnnnnnnnnnnanttttn

SEQ ID NO: 133 - DNA, 1198 bp, Homo Sapiens
  misc_feature (11)..(11): n is a, c, g, or t
  misc_feature (810)..(810): n is a, c, g, or t
  misc_feature (869)..(869): n is a, c, g, or t
  misc_feature (911)..(911): n is a, c, g, or t
  misc_feature (941)..(941): n is a, c, g, or t
  misc_feature (963)..(963): n is a, c, g, or t
  misc_feature (978)..(978): n is a, c, g, or t
  misc_feature (983)..(983): n is a, c, g, or t
  misc_feature (988)..(988): n is a, c, g, or t
  misc_feature (996)..(996): n is a, c, g, or t
  misc_feature (1005)..(1005): n is a, c, g, or t
  misc_feature (1021)..(1022): n is a, c, g, or t
  misc_feature (1033)..(1033): n is a, c, g, or t
  misc_feature (1045)..(1045): n is a, c, g, or t
  misc_feature (1060)..(1060): n is a, c, g, or t
  misc_feature (1065)..(1065): n is a, c, g, or t
  misc_feature (1067)..(1067): n is a, c, g, or t
  misc_feature (1069)..(1069): n is a, c, g, or t
  misc_feature (1077)..(1077): n is a, c, g, or t
  misc_feature (1083)..(1083): n is a, c, g, or t
  misc_feature (1088)..(1088): n is a, c, g, or t
  misc_feature (1091)..(1092): n is a, c, g, or t
  misc_feature (1099)..(1099): n is a, c, g, or t
  misc_feature (1103)..(1104): n is a, c, g, or t
  misc_feature (1106)..(1106): n is a, c, g, or t
  misc_feature (1109)..(1109): n is a, c, g, or t
  misc_feature (1117)..(1120): n is a, c, g, or t
  misc_feature (1125)..(1125): n is a, c, g, or t
  misc_feature (1132)..(1132): n is a, c, g, or t
  misc_feature (1138)..(1138): n is a, c, g, or t
  misc_feature (1145)..(1145): n is a, c, g, or t
  misc_feature (1147)..(1147): n is a, c, g, or t
  misc_feature (1149)..(1149): n is a, c, g, or t
  misc_feature (1153)..(1153): n is a, c, g, or t
  misc_feature (1159)..(1160): n is a, c, g, or t
  misc_feature (1179)..(1179): n is a, c, g, or t
  misc_feature (1183)..(1185): n is a, c, g, or t
  misc_feature (1188)..(1188): n is a, c, g, or t
  misc_feature (1190)..(1190): n is a, c, g, or t
  misc_feature (1196)..(1196): n is a, c, g, or t
aatagagaaanttaactatgagaggatcgcatcaccatcaccatcacggatcctatttaggtgacactatagaatcgtcgacccacgcgtccgcgtttagaggtttgaattttctcggagaaagacaggccggccacgaggaaaacagaaacaagccgcagcaacatctaagcccttgaaaggatcctgagagaggggggaaagggaaaacagcagccaccagcccaaccacttgtgtcttctgccccttcccacctatcttgcccaccccaccagcccacgctgcttgggacttgaaatctgtggccgaaggacccccaaatggacgagggggccctggtgggggcatggttggaggtggtgggcatcgtcctcacgaaggccctggtgggggcatgggcaacagcagtggacatcgtccccacgaaggccctggcggtggcatgggaagtgggcatcgcccccatgaaggccctggtggtagcatgggtgggggtggaggacatcgtccccacgaaggccctggcggtggcatcagtggtggcagtggccatcgtccccatgaaggccctggcggaggaatgggtgctggtggtggacatcgcccccacgaaggccctggcggaagcatgggtggaagtggtggacatcgtccccatgaaggccctggacacggggggccccatggccaccggcctcatgatgtccctggtcaccgaggccatgaccatcgagggccgccacctcatgagcaccgtggccatgatggtcctggccacgggggagggggccaccgagggcacgatggangccacagccatggaggagacatgtcaaaccgccctgtctgccgacatttcatgatgaanggcaactgccgctatgaaaacaactgtgccttctaccacccngggtgtcaatgggccccccctgccctaggnaccatttgcctgccctgttcanacaacccctgtggantgcancctcnctctttcnccctgttanggcttctgtgaggccnnttttccttttncccactgaaaanaaccggccccctcantcccntngntgggttcngggggntttcnatnnggggccntgannanaantttctccnnnnggganaaaaaantgaaanttctgantntnaaanaaaccnnttgcttctttttaaaaatncccnnnccnancctttnaa

SEQ ID NO: 134 - DNA, 590 bp, Homo Sapiens
attaactatgagaggtcgcatcaccatcaccatcacggatcctatttaggtgacactatagaatcgtcgacccacgcgtccgcagagaagcccgcggccccggcccccgccaaggacgcgctgcgggccctgacgcagcggggccacgactcggtttatcagcagaataagtcggtgagcaccgacgagctggggcccccagggcggctggagggcgcgccccggcccgtggcccgcgagaagacctcgctgggcagcctgaagcgcgccagcgtggacgtggacctgctggccccgcgcagccccatggccaaggagaacatggtgaccttcagccacacgctgcccagggccagcgcgccctcgctggacgaccccgcgcgccgccacatgaccatccacgtgccgctggacgcctcgcgctccaagcagctcatcagcgagtggaagcagaagagcctggagggccgcggcctggggctgcccgacgacgccagccccgggcacctgcgcgcgcccgccgaacccatggcggaggaggaggaagaggaggaggacgaagaggaagaggaggaggaggaagaggagga

SEQ ID NO: 135 - DNA, 1413 bp, Homo Sapiens
  misc_feature (59)..(59): n is a, c, g, or t
  misc_feature (814)..(814): n is a, c, g, or t
  misc_feature (832)..(832): n is a, c, g, or t
  misc_feature (874)..(874): n is a, c, g, or t
  misc_feature (908)..(908): n is a, c, g, or t
  misc_feature (946)..(946): n is a, c, g, or t
  misc_feature (949)..(949): n is a, c, g, or t
  misc_feature (960)..(960): n is a, c, g, or t
  misc_feature (967)..(967): n is a, c, g, or t
  misc_feature (969)..(969): n is a, c, g, or t
  misc_feature (980)..(981): n is a, c, g, or t
  misc_feature (992)..(992): n is a, c, g, or t
  misc_feature (1005)..(1005): n is a, c, g, or t
  misc_feature (1021)..(1021): n is a, c, g, or t
  misc_feature (1025)..(1026): n is a, c, g, or t
  misc_feature (1033)..(1033): n is a, c, g, or t
  misc_feature (1036)..(1036): n is a, c, g, or t
  misc_feature (1039)..(1039): n is a, c, g, or t
  misc_feature (1041)..(1041): n is a, c, g, or t
  misc_feature (1046)..(1046): n is a, c, g, or t
  misc_feature (1055)..(1056): n is a, c, g, or t
  misc_feature (1058)..(1059): n is a, c, g, or t
  misc_feature (1075)..(1075): n is a, c, g, or t
  misc_feature (1084)..(1084): n is a, c, g, or t
  misc_feature (1088)..(1088): n is a, c, g, or t
  misc_feature (1108)..(1109): n is a, c, g, or t
  misc_feature (1111)..(1111): n is a, c, g, or t
  misc_feature (1114)..(1114): n is a, c, g, or t
  misc_feature (1121)..(1122): n is a, c, g, or t
  misc_feature (1137)..(1137): n is a, c, g, or t
  misc_feature (1141)..(1142): n is a, c, g, or t
  misc_feature (1144)..(1144): n is a, c, g, or t
  misc_feature (1147)..(1147): n is a, c, g, or t
  misc_feature (1151)..(1152): n is a, c, g, or t
  misc_feature (1154)..(1154): n is a, c, g, or t
  misc_feature (1158)..(1160): n is a, c, g, or t
  misc_feature (1167)..(1167): n is a, c, g, or t
  misc_feature (1174)..(1174): n is a, c, g, or t
  misc_feature (1187)..(1187): n is a, c, g, or t
  misc_feature (1190)..(1190): n is a, c, g, or t
  misc_feature (1192)..(1192): n is a, c, g, or t
  misc_feature (1199)..(1199): n is a, c, g, or t
  misc_feature (1202)..(1202): n is a, c, g, or t
  misc_feature (1206)..(1206): n is a, c, g, or t
  misc_feature (1212)..(1212): n is a, c, g, or t
  misc_feature (1215)..(1215): n is a, c, g, or t
  misc_feature (1218)..(1218): n is a, c, g, or t
  misc_feature (1225)..(1227): n is a, c, g, or t
  misc_feature (1231)..(1233): n is a, c, g, or t
  misc_feature (1238)..(1238): n is a, c, g, or t
  misc_feature (1243)..(1244): n is a, c, g, or t
  misc_feature (1248)..(1248): n is a, c, g, or t
  misc_feature (1255)..(1255): n is a, c, g, or t
  misc_feature (1265)..(1265): n is a, c, g, or t
  misc_feature (1278)..(1278): n is a, c, g, or t
  misc_feature (1286)..(1286): n is a, c, g, or t
  misc_feature (1293)..(1293): n is a, c, g, or t
  misc_feature (1305)..(1305): n is a, c, g, or t
  misc_feature (1307)..(1307): n is a, c, g, or t
  misc_feature (1323)..(1323): n is a, c, g, or t
  misc_feature (1325)..(1325): n is a, c, g, or t
  misc_feature (1328)..(1328): n is a, c, g, or t
  misc_feature (1353)..(1354): n is a, c, g, or t
  misc_feature (1364)..(1364): n is a, c, g, or t
  misc_feature (1366)..(1366): n is a, c, g, or t
  misc_feature (1372)..(1373): n is a, c, g, or t
  misc_feature (1379)..(1382): n is a, c, g, or t
  misc_feature (1384)..(1384): n is a, c, g, or t
  misc_feature (1387)..(1388): n is a, c, g, or t
  misc_feature (1390)..(1391): n is a, c, g, or t
  misc_feature (1396)..(1396): n is a, c, g, or t
  misc_feature (1409)..(1412): n is a, c, g, or t
aatagagagattaactatgagaggatcgcatcaccatcaccatcacggatcctatttangtgacactatagaatcgtcgacccacgcgtccgagccgccatcttgtgggagcaaaaccaacgcctggctcggagcagcagcctctgaggtgtccctggccagtgtccttccacctgtccacaagcatggggaacatcttcgccaacctcttcaagggcctttttggcaaaaaagaaatgcgcatcctcatggtgggcctggatgctgcagggaagaccacgatcctctacaagcttaagctgggtgagatcgtgaccaccattcccaccataggcttcaacgtggaaaccgtggagtacaagaacatcagcttcactgtgtgggacgtgggtggccaggacaagatccggcccctgtggcgccactacttccagaacacacaaggcctgatcttcgtggtggacagcaatgacagagagcgtgtgaacgaggcccgtgaggagctcatgaggatgctggccgaggacgagctccgggatgctgtcctcctggtgttcgccaacaagcaggacctccccaacgccatgaatgcggccgagatcacagacaagctggggctgcactcactacgccacaggaactggtacattcaggccacctgcgccaccagcggcgacgggctctatgaaggactggactggctgtccaatcagctccggaaccagaagtgaacgcgacccccctccctctcactcctcttgccctctgctttactctcatgtggcaaacgtgcggctcgtggtgtgagtgccanaagctgcctccgtggttnggtcaccgtgtgcatcgcaccgtgctgtaaatgtgggcagangcagcctgcggccaggcttttttatttaaatgtnaaatagttttttgtttccaaatgaggcagttttctggnacncctatgcaaanatttacncnacctttttttnnttgtaaaaaanaaaaaatcaactnccttgttcaatgcttnaaannggaattnagnccntngggcncctggcctnnannaatccctttggttggnaaaaacccngccnacccctttggtttaaaaccnngnttnaaatccnnttttggggggttggntttnnanccnaacnncncggnnnttttttntaaaaantttaaaaaatcanatncngaaaacnttnaaanccaaanggnaanccccccnnnaaannntttanttacnnttgnaatcaancccacccccnttttttcccttgnaaatatanggggggngggcacaaaaangnaataattttgggtccnanaanatcccccatcctttttttgtacccnntttaaaactntntttccnntccccnnnnanggnnannggaancacccccctttcnnnnc

SEQ ID NO: 136 - DNA, 833 bp, Homo Sapiens
aactatgagaggtcgcatcaccagtcaccatcacggatcctatttaggtgacactatagaatcgtcgacccacgcgtccgggcgcgcgggccccggagcgggcgcggcggagcgcggcgagcccggcgcctcccgtcccgaacatgcggaggccggcccaggcggcgcgggagccggagcgggggcccaagcgggcaccggagccggagcgcgagggggcgcggggcccggagcgggggtccgcgctgcgctgctgaggccgggccggccgcccagacgctgcccgcgggcccggccacggcggagccaagctgtgagccgtgagctttgaggcggtgggatgtgtcagcagaatgtctcctgcccccgagagcgaccccgaggccactgagaagagcagcgcggcctggccggcccgaacgcctgcgtctcagtagctgggagccacgggcccacgcccgcccaccggccgcagtgatgttctagccacagaggagccaagacctcaggtttccagagacttgggatttgcacggcagcagagtcaccgtggagaggccagggtatcacaaacttatggattttgacaagaaaggagggaaaggggagacggaggaggggtgctgtggagctgtcttgcccaggccctcctgggagggggacaggcattgttgccaggggtgaggccgtgccccaggcctccccgaaaccaaaggggaaggcaggggtggggccgtggctgaagccggctccccaaccaaaatgctgcaccaaagctcgggcgccgcgggcacggctgctgcagtctcttcccagcctggccctggcaaggg

SEQ ID NO: 137 - DNA, 833 bp, Homo Sapiens
  misc_feature (4)..(4): n is a, c, g, or t
  misc_feature (601)..(601): n is a, c, g, or t
  misc_feature (667)..(667): n is a, c, g, or t
  misc_feature (686)..(686): n is a, c, g, or t
  misc_feature (691)..(691): n is a, c, g, or t
  misc_feature (693)..(693): n is a, c, g, or t
  misc_feature (706)..(706): n is a, c, g, or t
  misc_feature (708)..(708): n is a, c, g, or t
  misc_feature (715)..(715): n is a, c, g, or t
  misc_feature (722)..(722): n is a, c, g, or t
  misc_feature (726)..(726): n is a, c, g, or t
  misc_feature (734)..(734): n is a, c, g, or t
  misc_feature (752)..(752): n is a, c, g, or t
  misc_feature (760)..(760): n is a, c, g, or t
  misc_feature (765)..(765): n is a, c, g, or t
  misc_feature (768)..(768): n is a, c, g, or t
  misc_feature (772)..(772): n is a, c, g, or t
  misc_feature (789)..(789): n is a, c, g, or t
  misc_feature (795)..(795): n is a, c, g, or t
  misc_feature (806)..(806): n is a, c, g, or t
  misc_feature (812)..(812): n is a, c, g, or t
  misc_feature (815)..(815): n is a, c, g, or t
  misc_feature (819)..(820): n is a, c, g, or t
  misc_feature (824)..(824): n is a, c, g, or t
  misc_feature (830)..(830): n is a, c, g, or t
atangagaaaattacttttgagaggatcgcatcaccatcaccatcacggatcctatttaggtgacactatagaatcgtcgacccacgcgtccggcgcgggccgaccgggcgcaccgaccatggcctccaaatgccccaagtgcgacaagaccgtgtacttcgccgagaaggtgagctccctggggaaggactggcacaagttctgcctcaagtgcgagcgctgcagcaagacgctgacgcccgggggccacgccgagcatgacgagaagcccctggcggaggggccgcaggtcaccggccccatcgaggtccccgcggcccgagcagaggagcggaaggcgagcggccccccgaaggggcccagcagagcctccagtgtcaccactttcaccggggagcccaacacgtgcccgcgctgcagcaagaaggtgtacttcgctgagaaggtgacgtctctgggcaaggattggcaccggccctgcctgcgctgcgagcgctgcgggaagacactgacccccggcgggcacgcggagcacgacggccagccctactgccacaagccctgctatggaatcctcttcggacccaagggtgagtgtanccagggtggtccacgatgtcttccctgccctccccttccctccactgttctcccgacccaccccancggcctccctccacaggantgaanancggtgcggtgggnanctacatntatgacngggnaccccganggcaaggtccagccctangctacagnggctntcntgantgtgggtttcacctgcnccccanaccctgcaggncccccntgnttgnntctncttggnaaa

SEQ ID NO: 138 - DNA, 1334 bp, Homo Sapiens
  misc_feature (835)..(835): n is a, c, g, or t
  misc_feature (887)..(887): n is a, c, g, or t
  misc_feature (943)..(943): n is a, c, g, or t
  misc_feature (951)..(951): n is a, c, g, or t
  misc_feature (959)..(959): n is a, c, g, or t
  misc_feature (971)..(971): n is a, c, g, or t
  misc_feature (977)..(977): n is a, c, g, or t
  misc_feature (980)..(980): n is a, c, g, or t
  misc_feature (990)..(990): n is a, c, g, or t
  misc_feature (1003)..(1003): n is a, c, g, or t
  misc_feature (1006)..(1006): n is a, c, g, or t
  misc_feature (1009)..(1009): n is a, c, g, or t
  misc_feature (1011)..(1011): n is a, c, g, or t
  misc_feature (1016)..(1016): n is a, c, g, or t
  misc_feature (1019)..(1019): n is a, c, g, or t
  misc_feature (1022)..(1022): n is a, c, g, or t
  misc_feature (1025)..(1025): n is a, c, g, or t
  misc_feature (1027)..(1027): n is a, c, g, or t
  misc_feature (1061)..(1061): n is a, c, g, or t
  misc_feature (1063)..(1064): n is a, c, g, or t
  misc_feature (1066)..(1066): n is a, c, g, or t
  misc_feature (1069)..(1069): n is a, c, g, or t
  misc_feature (1071)..(1072): n is a, c, g, or t
  misc_feature (1077)..(1077): n is a, c, g, or t
  misc_feature (1084)..(1084): n is a, c, g, or t
  misc_feature (1091)..(1092): n is a, c, g, or t
  misc_feature (1097)..(1097): n is a, c, g, or t
  misc_feature (1101)..(1101): n is a, c, g, or t
  misc_feature (1106)..(1106): n is a, c, g, or t
  misc_feature (1120)..(1120): n is a, c, g, or t
  misc_feature (1123)..(1123): n is a, c, g, or t
  misc_feature (1130)..(1130): n is a, c, g, or t
  misc_feature (1140)..(1142): n is a, c, g, or t
  misc_feature (1157)..(1157): n is a, c, g, or t
  misc_feature (1160)..(1160): n is a, c, g, or t
  misc_feature (1163)..(1163): n is a, c, g, or t
  misc_feature (1178)..(1178): n is a, c, g, or t
  misc_feature (1181)..(1181): n is a, c, g, or t
  misc_feature (1186)..(1186): n is a, c, g, or t
  misc_feature (1190)..(1190): n is a, c, g, or t
  misc_feature (1196)..(1196): n is a, c, g, or t
  misc_feature (1202)..(1202): n is a, c, g, or t
  misc_feature (1207)..(1207): n is a, c, g, or t
  misc_feature (1211)..(1211): n is a, c, g, or t
  misc_feature (1214)..(1214): n is a, c, g, or t
  misc_feature (1217)..(1217): n is a, c, g, or t
  misc_feature (1221)..(1223): n is a, c, g, or t
  misc_feature (1227)..(1228): n is a, c, g, or t
  misc_feature (1231)..(1231): n is a, c, g, or t
  misc_feature (1233)..(1233): n is a, c, g, or t
  misc_feature (1236)..(1237): n is a, c, g, or t
  misc_feature (1240)..(1240): n is a, c, g, or t
  misc_feature (1244)..(1244): n is a, c, g, or t
  misc_feature (1247)..(1247): n is a, c, g, or t
  misc_feature (1251)..(1252): n is a, c, g, or t
  misc_feature (1257)..(1257): n is a, c, g, or t
  misc_feature (1262)..(1262): n is a, c, g, or t
  misc_feature (1265)..(1265): n is a, c, g, or t
  misc_feature (1274)..(1275): n is a, c, g, or t
  misc_feature (1277)..(1279): n is a, c, g, or t
  misc_feature (1287)..(1287): n is a, c, g, or t
  misc_feature (1290)..(1291): n is a, c, g, or t
  misc_feature (1294)..(1295): n is a, c, g, or t
  misc_feature (1311)..(1311): n is a, c, g, or t
  misc_feature (1313)..(1314): n is a, c, g, or t
  misc_feature (1321)..(1321): n is a, c, g, or t
  misc_feature (1331)..(1331): n is a, c, g, or t
  misc_feature (1334)..(1334): n is a, c, g, or t
tagagagaattactatgagaggatcgcatcaccatcaccatcacggatcctatttaggtgacactatagaatcgtcgacccacgcgtccgcctgcgtcgctccgggagctgccgacggacggagcgcccccgcccccgcccggccgcccgcccgccgccgccatgcccttctccaacagccacaacgcactgaagctgcgcttcccggccgaggacgagttccccgacctgagcgcccacaacaaccacatggccaaggtgctgacccccgagctgtacgcggagctgcgcgccaagagcacgccgagcggcttcacgctggacgacgtcatccagacaggcgtggacaacccgggccacccgtacatcatgaccgtgggctgcgtggcgggcgacgaggagtcctacgaagtgttcaaggatctcttcgaccccatcatcgaggaccggcacggcggctacaagcccagcgatgagcacaagaccgacctcaaccccgacaacctgcagggcggcgacgacctggaccccaactacgtgctgagctcgcgggtgcgcacgggccgcagcatccgtggcttctgcctccccccgcactgcagccgcggggagcgccgagccatcgagaagctcgcggtggaagccctgtccagcctggacggcgacctggcgggccgatactacgcgctcaagagcatgacggaggcggagcagcagcagctcatcgacgaccacttcctcttcgacaagcccgtgtcgcccctgctgctggcctcgggcatggcccgcgactggcccgacgcccgcggtatctggcacaatgacaataaaaacnttcctggtgtgggtcaacgaggaggaccacctgcgggttcatctccatgcanaaggggggcaacatgaaaggaggtgttcacccgcttctgcaccgggcctcacccanattgaaanttttcttnaagtctaaggantatganttnatgtggaaancctcacctggggntanatncntcacntgnccnatncnaaccttgggcaccggggttgggggaaggtgtggnanntnagntnnccaancttgggnaaacatnnaaaantttncggangtgtttaaagcggntgnaaatttnaaaacaaggnnnaggggggggtgaaanggntgnggggggggggttttnaantttcnaagnttaacnctgggnttttnaaanggnaantggnnnaaannggngnaannaanaaanttntttnnaaagnaaaanggntgaaagggnngnnnttaaaaanttnnttnncaaaaaaaaccggccnannaaaaaantttttttttnatn

SEQ ID NO: 139 - DNA, 987 bp, Homo Sapiens
tgagaggtcgcatcaccatcaccatcacggatcctatttaggtgacactatagaatcgtcgacccacgcgtccgggcggctcggggcgccgaggcttccgcgcccgctggttcctcgctccggggcggagctcgcgatagcgaccgggagcagggcgcggggcgggacccaggtccgaggcgaggaagccggaagccaggcgcggggagcctcccccttcgactgcagcctcgctccgtgccttctgcgcgcctgggatcccggagcctgcctaggttctgtgcgctcccgcccaggccggtgcccgccgcccgcctgcgccccaggcaggtcccaggcctccggctgctcccggccgaaggtggggacaggcagtggcaggcaccactagcgagggcgtttgggaacccagggtgaccacggcgcagccatggggaccgcgcttgtgtaccatgaggacatgacggccacccggctgctctgggacgagtaagtgggacctggccgaggtggggtgcggggagggacctctgaactgagctcctcatctgccccagccccgagtgcgagatcgagcgtcctgagcgcctgaccgcagccctggatcgcctgcggcagcgcggcctggaacagaggtgtctgcggttgtcagcccgcgaggcctcggaagaggagctgggcctggtgcacagagtacctttcactgcgcgcggctggccgcaggggctggactgcagctggtggacgctgtgctcactggagctgtgcaaaatgggcttgccctggtgaggcctcccgggcaccatggccagagggcggctgccaacgggttctgcgtgttcaacaacgtggccatagcagctgcacatgccaagcagaaacacgggctacacaggatcctcgtcgtggactgggatgtgcaccatggccaggggatccagtatctctttgaggatgaccccagcgtccttttacttctcctggcac

SEQ ID NO: 140 - DNA, 1377 bp, Homo Sapiens
  misc_feature (768)..(768): n is a, c, g, or t
  misc_feature (783)..(783): n is a, c, g, or t
  misc_feature (850)..(850): n is a, c, g, or t
  misc_feature (868)..(868): n is a, c, g, or t
  misc_feature (878)..(878): n is a, c, g, or t
  misc_feature (897)..(897): n is a, c, g, or t
  misc_feature (912)..(912): n is a, c, g, or t
  misc_feature (924)..(924): n is a, c, g, or t
  misc_feature (932)..(932): n is a, c, g, or t
  misc_feature (991)..(991): n is a, c, g, or t
  misc_feature (994)..(994): n is a, c, g, or t
  misc_feature (996)..(996): n is a, c, g, or t
  misc_feature (1003)..(1003): n is a, c, g, or t
  misc_feature (1007)..(1007): n is a, c, g, or t
  misc_feature (1011)..(1011): n is a, c, g, or t
  misc_feature (1018)..(1018): n is a, c, g, or t
  misc_feature (1047)..(1048): n is a, c, g, or t
  misc_feature (1065)..(1065): n is a, c, g, or t
  misc_feature (1082)..(1082): n is a, c, g, or t
  misc_feature (1086)..(1086): n is a, c, g, or t
  misc_feature (1091)..(1091): n is a, c, g, or t
  misc_feature (1094)..(1094): n is a, c, g, or t
  misc_feature (1096)..(1096): n is a, c, g, or t
  misc_feature (1098)..(1099): n is a, c, g, or t
  misc_feature (1110)..(1112): n is a, c, g, or t
  misc_feature (1114)..(1114): n is a, c, g, or t
  misc_feature (1127)..(1127): n is a, c, g, or t
  misc_feature (1141)..(1141): n is a, c, g, or t
  misc_feature (1143)..(1143): n is a, c, g, or t
  misc_feature (1147)..(1147): n is a, c, g, or t
  misc_feature (1157)..(1157): n is a, c, g, or t
  misc_feature (1160)..(1160): n is a, c, g, or t
  misc_feature (1164)..(1164): n is a, c, g, or t
  misc_feature (1167)..(1167): n is a, c, g, or t
  misc_feature (1174)..(1174): n is a, c, g, or t
  misc_feature (1185)..(1185): n is a, c, g, or t
  misc_feature (1193)..(1193): n is a, c, g, or t
  misc_feature (1195)..(1195): n is a, c, g, or t
  misc_feature (1199)..(1199): n is a, c, g, or t
  misc_feature (1204)..(1206): n is a, c, g, or t
  misc_feature (1210)..(1210): n is a, c, g, or t
  misc_feature (1216)..(1216): n is a, c, g, or t
  misc_feature (1222)..(1222): n is a, c, g, or t
  misc_feature (1228)..(1230): n is a, c, g, or t
  misc_feature (1233)..(1233): n is a, c, g, or t
  misc_feature (1235)..(1237): n is a, c, g, or t
  misc_feature (1245)..(1245): n is a, c, g, or t
  misc_feature (1248)..(1248): n is a, c, g, or t
  misc_feature (1267)..(1267): n is a, c, g, or t
  misc_feature (1273)..(1273): n is a, c, g, or t
  misc_feature (1275)..(1275): n is a, c, g, or t
  misc_feature (1304)..(1304): n is a, c, g, or t
  misc_feature (1307)..(1307): n is a, c, g, or t
  misc_feature (1309)..(1309): n is a, c, g, or t
  misc_feature (1316)..(1316): n is a, c, g, or t
  misc_feature (1318)..(1319): n is a, c, g, or t
  misc_feature (1321)..(1321): n is a, c, g, or t
  misc_feature (1326)..(1326): n is a, c, g, or t
  misc_feature (1334)..(1334): n is a, c, g, or t
  misc_feature (1346)..(1346): n is a, c, g, or t
  misc_feature (1352)..(1352): n is a, c, g, or t
  misc_feature (1360)..(1360): n is a, c, g, or t
  misc_feature (1362)..(1362): n is a, c, g, or t
  misc_feature (1366)..(1366): n is a, c, g, or t
  misc_feature (1368)..(1369): n is a, c, g, or t
  misc_feature (1373)..(1373): n is a, c, g, or t
  misc_feature (1376)..(1377): n is a, c, g, or t
aatagagagaattactatgagaggatcgcatcaccatcaccatcacggatcctatttaggtgacactatagaatcgtcgacccacgcgtccgcccacgcgtccggcggccgcgtcgggaccggccgcgatgggaccggaggcggcgcgggcggcggcggcgcagacaaaggggccaaaccagtgctcctgccacctctctggctgccccctagagcctgcccatcccagcctgaccaatgtccacagccagggagcagccaatcttcagcacacgggcgcacgtgttccaaattgacccagccaccaagcgaaactggatcccagcgggcaagcacgcactcactgtctcctatttctacgatgccacccgcaatgtgtaccgcatcatcagcatcggaggcgccaaggccatcatcaacagcactgtcactcccaacatgaccttcaccaaaacttcccagaagttcgggcagtgggccgacagtcgcgccaacacagtctacggcctgggctttgcctctgaacagcatctgacacagtttgccgagaagttccaggaagtgaaggaagcagccaggctggccagggagaaatctcaggatggcggggagctcaccagtccagccctggggctcgcctcccaccaggtgcccccgagccctctcgtcagtgccaacggccccggcgaggaaaaactgttccgcagccagagcgctgatgcccccggccccacagagcgcgagcggctaaagaagatgttgtctganggctccgtgggcgangtacagtgggaggccgagtttttcgcactgcaggacagcaacaacaagctggcaggcgccctgcganaggccaacgccgccgcancccagtggangcagcagctggaggctcancgtgcaaaggccgancggctgcggcancgggtggntgaactggaggctcaggcaacttcaaagtgaccccccccggtgaaaaggagggctgggncangncaattcnctgnaaanctggaanctttggtgcaaaccaaggaccagaaattnnaaacctgaaaattcaantggggggcccccgaagncctngaagntgncnanngtgaagaaatnnncnaaaggggcagacntggaaccccaaagngnaatngaaaaccacnttngggnaangaaccanctgaaaaaacncggcaaangnaacngcccnnnttantggccngaaaanaatttnnnaanannnttttaaantanaattcgaggcctgcccctnttaaantnccccaaacggggttttttaaaaatcccgnaangnccacctngnnanatttncctttctngaaagggggggnaatttnctgggggngngggngnngggnccnn

SEQ ID NO: 141 - DNA, 1050 bp, Homo Sapiens
  misc_feature (854)..(854): n is a, c, g, or t
  misc_feature (907)..(907): n is a, c, g, or t
  misc_feature (916)..(916): n is a, c, g, or t
  misc_feature (952)..(952): n is a, c, g, or t
  misc_feature (961)..(961): n is a, c, g, or t
  misc_feature (1014)..(1014): n is a, c, g, or t
  misc_feature (1023)..(1023): n is a, c, g, or t
  misc_feature (1029)..(1029): n is a, c, g, or t
  misc_feature (1038)..(1038): n is a, c, g, or t
  misc_feature (1040)..(1040): n is a, c, g, or t
aaattagagaaaattactatgagaggatcgcatcaccatcaccatcacggatcctatttaggtgacactatagaatcgtcgacccacgcgtccggccccaggcaccgccagagtgtcctgctacctttgtctcacgattccagtgcagtagtgccaaaaggccccttcccacgtccctcgagctctgtagcctggtctgtgcattgtggctgtcaaatccatgtgtcccccctgtggtcgtgtgccccatggagaccatcaaggtgaagttcatccacgaccagacctccccaaaccccaagtacagaggattcttccacggggttagggagattgtgcgggaacaagggctgaaggggacgtaccagggcctcacagccactgtcctgaagcagggctcgaaccaggccatccgcttcttcgtcatgacctccctgcgcaactggtaccgaggggacaaccccaacaagcccatgaaccctctgatcactggggtcttcggagctattgcaggcgcagccagtgtctttggaaacactcctctggatgtgattaagacccggatgcagggcctggaggcgcacaaataccggaacacgtgggactgcggcttgcagatcctgaagaaggaggggctcaaggcattctacaagggcactgtcccccgcctgggccgggtctgcctggatgtggccatagtgtttgtcatctatgatgaagtggtgaagctgctcaacaaagtgtggaagacggactaagcctagagaggccgcaaggggaccgccccaggcaccgccagagtggcctgggtcctcggccctgtagccctggcccggtcccagtccggtgccttnccaccctgccctggcctaccacagctgcctccgggcctcggcctggcttcacngcattccangggctgcagccccctgcttcttcccgccattgggcnttaactggncctcgggccctctctccgcccccggaaagggtggcacccaccactctcaggancaccctgcnaagganaaaaaaacngnatcctgttgc

SEQ ID NO: 142 - DNA, 1382 bp, Homo Sapiens
  misc_feature (775)..(775): n is a, c, g, or t
  misc_feature (817)..(817): n is a, c, g, or t
  misc_feature (841)..(841): n is a, c, g, or t
  misc_feature (844)..(844): n is a, c, g, or t
  misc_feature (863)..(863): n is a, c, g, or t
  misc_feature (869)..(869): n is a, c, g, or t
  misc_feature (883)..(883): n is a, c, g, or t
  misc_feature (920)..(920): n is a, c, g, or t
  misc_feature (931)..(931): n is a, c, g, or t
  misc_feature (934)..(934): n is a, c, g, or t
  misc_feature (951)..(951): n is a, c, g, or t
  misc_feature (961)..(961): n is a, c, g, or t
  misc_feature (967)..(967): n is a, c, g, or t
  misc_feature (971)..(971): n is a, c, g, or t
  misc_feature (979)..(979): n is a, c, g, or t
  misc_feature (987)..(987): n is a, c, g, or t
  misc_feature (999)..(999): n is a, c, g, or t
  misc_feature (1001)..(1002): n is a, c, g, or t
  misc_feature (1007)..(1007): n is a, c, g, or t
  misc_feature (1013)..(1013): n is a, c, g, or t
  misc_feature (1018)..(1019): n is a, c, g, or t
  misc_feature (1023)..(1024): n is a, c, g, or t
  misc_feature (1026)..(1026): n is a, c, g, or t
  misc_feature (1029)..(1030): n is a, c, g, or t
  misc_feature (1037)..(1037): n is a, c, g, or t
  misc_feature (1043)..(1043): n is a, c, g, or t
  misc_feature (1058)..(1058): n is a, c, g, or t
  misc_feature (1061)..(1062): n is a, c, g, or t
  misc_feature (1082)..(1082): n is a, c, g, or t
  misc_feature (1084)..(1084): n is a, c, g, or t
  misc_feature (1086)..(1086): n is a, c, g, or t
  misc_feature (1094)..(1096): n is a, c, g, or t
  misc_feature (1098)..(1098): n is a, c, g, or t
  misc_feature (1109)..(1114): n is a, c, g, or t
  misc_feature (1117)..(1118): n is a, c, g, or t
  misc_feature (1121)..(1121): n is a, c, g, or t
  misc_feature (1123)..(1124): n is a, c, g, or t
  misc_feature (1128)..(1130): n is a, c, g, or t
  misc_feature (1133)..(1135): n is a, c, g, or t
  misc_feature (1139)..(1141): n is a, c, g, or t
  misc_feature (1144)..(1147): n is a, c, g, or t
  misc_feature (1153)..(1153): n is a, c, g, or t
  misc_feature (1155)..(1156): n is a, c, g, or t
  misc_feature (1160)..(1162): n is a, c, g, or t
  misc_feature (1164)..(1165): n is a, c, g, or t
  misc_feature (1169)..(1169): n is a, c, g, or t
  misc_feature (1171)..(1171): n is a, c, g, or t
  misc_feature (1177)..(1180): n is a, c, g, or t
  misc_feature (1184)..(1186): n is a, c, g, or t
  misc_feature (1191)..(1194): n is a, c, g, or t
  misc_feature (1197)..(1202): n is a, c, g, or t
  misc_feature (1204)..(1207): n is a, c, g, or t
  misc_feature (1209)..(1209): n is a, c, g, or t
  misc_feature (1211)..(1220): n is a, c, g, or t
  misc_feature (1222)..(1223): n is a, c, g, or t
  misc_feature (1225)..(1234): n is a, c, g, or t
  misc_feature (1239)..(1243): n is a, c, g, or t
  misc_feature (1245)..(1249): n is a, c, g, or t
  misc_feature (1251)..(1251): n is a, c, g, or t
  misc_feature (1254)..(1261): n is a, c, g, or t
  misc_feature (1264)..(1264): n is a, c, g, or t
  misc_feature (1266)..(1266): n is a, c, g, or t
  misc_feature (1268)..(1276): n is a, c, g, or t
  misc_feature (1278)..(1282): n is a, c, g, or t
  misc_feature (1284)..(1292): n is a, c, g, or t
  misc_feature (1298)..(1308): n is a, c, g, or t
  misc_feature (1312)..(1312): n is a, c, g, or t
  misc_feature (1319)..(1320): n is a, c, g, or t
  misc_feature (1322)..(1336): n is a, c, g, or t
  misc_feature (1339)..(1358): n is a, c, g, or t
  misc_feature (1360)..(1360): n is a, c, g, or t
  misc_feature (1362)..(1381): n is a, c, g, or t
gagaaattactatgagaggatcgcatcaccatcaccatcacgggatcctatttaggtgacactatagaatcgtcgacccacgcgtccgcccacgcgtccgcatccccgaggtccccagcgaggacacacactccacgagagcagcccctccactctgcccaggagaggggccgaccctcctcgggaaccggccacccgcgtggctcccagcatccatcaggacaagcccacgtggggtcctccctgcgtgctcagagggtctgtccagccctgggaagcgaccttggcctcagttcacagcctggtgctcatctgctggcaccgggcatccacccatcagcccccgccctgtccctccgaaggacacccagcaggcaccccccggggaggcaggggcagaggtcagaaggggtgtctgggacctggatggccagcagggacaggggcattgtcatctcaaaggcccaacccccagaggccacaccagtcctcccagggagtcctcgagtcgccctgcccagagccctggcaccagagacgccaagagcctgtggggtgactcggagcagcaggtgtggccccgggcgggcggcaccgcgtccagggcagcctccctccgctgagtgacacgggacaccagtgcccggccgacgcgcctttgcaggagaaatgtgcaaacctctgtggataccatttcatttccattcttgtgttgtctccaaggcccctttggagatatacttggtgttggttgtgttttttggttccttttcanaaaactgtaaaccgaggctgacgtgctccactgactgtgccnaggggcggggggcaggaggacggnaanacctatttataatatttancgaaantcggtctccctcanatcccccgcgagggaaggctgctggaacccaccccgnttgtcccccanganaaaaattttgtaaatanctttggtgancaatgnccantttccctnctgggttnacctctgatggntnnttgtncattgnaaaanntggnnangtnnaaatttnttgtantgtaaaaaataaaanggnntttgttttaaaatgaaaaangngnaaaatttnnntntgttttttggnnnnnnttnntcncnntaannnttnnnaaannnttnnnntttccncnnaaannngnntaangnaaaatnnnntttnnntgggnnnnttnnnnnngnnnngntnnnnnnnnnntnntnnnnnnnnnnaaaannnnngnnnnntnttnnnnnnnnggntnannnnnnnnntnnnnnannnnnnnnntttttnnnnnnnnnnntttnaaaaaannannnnnnnnnnnnnnnttnnnnnnnnnnnnnnnnnnnntntnnnnnnnnnnnnnnnnnnnna

SEQ ID NO: 143 - DNA, 1387 bp, Homo Sapiens
  misc_feature (653)..(653): n is a, c, g, or t
  misc_feature (736)..(736): n is a, c, g, or t
  misc_feature (787)..(787): n is a, c, g, or t
  misc_feature (829)..(829): n is a, c, g, or t
  misc_feature (844)..(844): n is a, c, g, or t
  misc_feature (855)..(855): n is a, c, g, or t
  misc_feature (858)..(858): n is a, c, g, or t
  misc_feature (864)..(864): n is a, c, g, or t
  misc_feature (875)..(875): n is a, c, g, or t
  misc_feature (905)..(905): n is a, c, g, or t
  misc_feature (909)..(909): n is a, c, g, or t
  misc_feature (921)..(921): n is a, c, g, or t
  misc_feature (935)..(935): n is a, c, g, or t
  misc_feature (937)..(937): n is a, c, g, or t
  misc_feature (946)..(946): n is a, c, g, or t
  misc_feature (965)..(965): n is a, c, g, or t
  misc_feature (974)..(975): n is a, c, g, or t
  misc_feature (984)..(984): n is a, c, g, or t
  misc_feature (988)..(988): n is a, c, g, or t
  misc_feature (992)..(992): n is a, c, g, or t
  misc_feature (998)..(998): n is a, c, g, or t
  misc_feature (1011)..(1011): n is a, c, g, or t
  misc_feature (1014)..(1014): n is a, c, g, or t
  misc_feature (1024)..(1024): n is a, c, g, or t
  misc_feature (1026)..(1026): n is a, c, g, or t
  misc_feature (1029)..(1029): n is a, c, g, or t
  misc_feature (1031)..(1031): n is a, c, g, or t
  misc_feature (1041)..(1041): n is a, c, g, or t
  misc_feature (1043)..(1043): n is a, c, g, or t
  misc_feature (1047)..(1048): n is a, c, g, or t
  misc_feature (1053)..(1053): n is a, c, g, or t
  misc_feature (1055)..(1055): n is a, c, g, or t
  misc_feature (1060)..(1060): n is a, c, g, or t
  misc_feature (1065)..(1065): n is a, c, g, or t
  misc_feature (1070)..(1070): n is a, c, g, or t
  misc_feature (1073)..(1073): n is a, c, g, or t
  misc_feature (1079)..(1079): n is a, c, g, or t
  misc_feature (1084)..(1084): n is a, c, g, or t
  misc_feature (1086)..(1087): n is a, c, g, or t
  misc_feature (1095)..(1096): n is a, c, g, or t
  misc_feature (1103)..(1103): n is a, c, g, or t
  misc_feature (1110)..(1111): n is a, c, g, or t
  misc_feature (1114)..(1114): n is a, c, g, or t
  misc_feature (1116)..(1116): n is a, c, g, or t
  misc_feature (1118)..(1118): n is a, c, g, or t
  misc_feature (1122)..(1122): n is a, c, g, or t
  misc_feature (1124)..(1124): n is a, c, g, or t
  misc_feature (1127)..(1127): n is a, c, g, or t
  misc_feature (1129)..(1130): n is a, c, g, or t
  misc_feature (1136)..(1136): n is a, c, g, or t
  misc_feature (1142)..(1142): n is a, c, g, or t
  misc_feature (1166)..(1166): n is a, c, g, or t
  misc_feature (1168)..(1168): n is a, c, g, or t
  misc_feature (1180)..(1181): n is a, c, g, or t
  misc_feature (1183)..(1183): n is a, c, g, or t
  misc_feature (1187)..(1188): n is a, c, g, or t
  misc_feature (1191)..(1194): n is a, c, g, or t
  misc_feature (1197)..(1198): n is a, c, g, or t
  misc_feature (1200)..(1203): n is a, c, g, or t
  misc_feature (1206)..(1207): n is a, c, g, or t
  misc_feature (1209)..(1209): n is a, c, g, or t
  misc_feature (1211)..(1212): n is a, c, g, or t
  misc_feature (1217)..(1217): n is a, c, g, or t
  misc_feature (1226)..(1226): n is a, c, g, or t
  misc_feature (1229)..(1230): n is a, c, g, or t
  misc_feature (1232)..(1232): n is a, c, g, or t
  misc_feature (1237)..(1238): n is a, c, g, or t
  misc_feature (1247)..(1247): n is a, c, g, or t
  misc_feature (1263)..(1263): n is a, c, g, or t
  misc_feature (1266)..(1266): n is a, c, g, or t
  misc_feature (1272)..(1281): n is a, c, g, or t
  misc_feature (1283)..(1283): n is a, c, g, or t
  misc_feature (1285)..(1285): n is a, c, g, or t
  misc_feature (1287)..(1287): n is a, c, g, or t
  misc_feature (1293)..(1302): n is a, c, g, or t
  misc_feature (1304)..(1305): n is a, c, g, or t
  misc_feature (1307)..(1309): n is a, c, g, or t
  misc_feature (1312)..(1317): n is a, c, g, or t
  misc_feature (1319)..(1319): n is a, c, g, or t
  misc_feature (1322)..(1322): n is a, c, g, or t
  misc_feature (1324)..(1325): n is a, c, g, or t
  misc_feature (1328)..(1328): n is a, c, g, or t
  misc_feature (1337)..(1337): n is a, c, g, or t
  misc_feature (1340)..(1346): n is a, c, g, or t
  misc_feature (1348)..(1351): n is a, c, g, or t
  misc_feature (1359)..(1359): n is a, c, g, or t
  misc_feature (1364)..(1364): n is a, c, g, or t
  misc_feature (1366)..(1366): n is a, c, g, or t
  misc_feature (1369)..(1369): n is a, c, g, or t
  misc_feature (1372)..(1374): n is a, c, g, or t
  misc_feature (1381)..(1382): n is a, c, g, or t
  misc_feature (1385)..(1385): n is a, c, g, or t
tagagaaattactatgagaggatcgcatcaccatcaccatcacggatcctatttaggtgacactatagaatcgtcgacccacgcgtccggccgaccgggcgcaccgaccatggcctccaaatgccccaagtgcgacaagaccgtgtacttcgccgagaaggtgagctccctggggaaggactggcacaagttctgcctcaagtgcgagcgctgcagcaagacgctgacgcccgggggccacgccgagcatgacgggaagccgttctgccacaagccgtgctacgccaccctgttcggacccaaaggcgtgaacatcgggggcgcgggctcctacatctacgagaagcccctggcggaggggccgcaggtcaccggccccatcgaggtccccgcggcccgagcagaggagcggaaggcgagcggccccccgaaggggcccagcagagcctccagtgtcaccactttcaccggggagcccaacacgtgcccgcgctgcagcaagaaggtgtacttcgctgagaaggtgacgtctctgggcaaggattggcaccggccctgcctgcgctgcgagcgctgcgggaagacactgacccccggcgggcacgcggagcacgacggccagccctactgccacaagccctgctatggaatcntcttcggacccaagggagtgaacaccggtgcggtgggcagctacatctatgaccgggaccccgaaggcaaggtccagccctangctacagcggctctcatgatgtgggctcaccctgcgccccaaaccctgcangggcccccctgcttggctctgctgggaaaagtgcttaacccncccagtcttgcctgnaagcccagggngantattgnaggagggcaanccacgggcaaaacaaccatgcccatccccnaatntttgggtgtgtntgcccccttttggnancttttgggngtcccattaatcccttttngggttggcnngtccaaatncccngttnaacctnttccaaaattttnccnccaaaccttngnttntncccggggggntnttcnnttttncnttttntgttngccancancttggnaaagntnntttaagcnnccctttngggggannggncncncccntnccnannttcttnggaaanggtttttcctccggaattccttgntngggccaaatggnntnaaannttnnnnccnntnnnngtnncncnnttttnaaacttttnttnnanaaaannttttaaatnaaaaaaaaaaaaaaanggncccccnnnnnnnnnntnantntttttnnnnnnnnnncnntnnnaannnnnnanccnanntcnttttttttnaannnnnnncnnnntttttttnaaaananttnttnnnattttannaanaa

SEQ ID NO: 144 - DNA, 1172 bp, Homo Sapiens
  misc_feature (796)..(796): n is a, c, g, or t
  misc_feature (862)..(862): n is a, c, g, or t
  misc_feature (864)..(864): n is a, c, g, or t
  misc_feature (876)..(876): n is a, c, g, or t
  misc_feature (889)..(889): n is a, c, g, or t
  misc_feature (893)..(893): n is a, c, g, or t
  misc_feature (918)..(918): n is a, c, g, or t
  misc_feature (920)..(920): n is a, c, g, or t
  misc_feature (929)..(929): n is a, c, g, or t
  misc_feature (942)..(942): n is a, c, g, or t
  misc_feature (947)..(947): n is a, c, g, or t
  misc_feature (951)..(951): n is a, c, g, or t
  misc_feature (963)..(963): n is a, c, g, or t
  misc_feature (990)..(990): n is a, c, g, or t
  misc_feature (997)..(997): n is a, c, g, or t
  misc_feature (1009)..(1009): n is a, c, g, or t
  misc_feature (1011)..(1011): n is a, c, g, or t
  misc_feature (1015)..(1015): n is a, c, g, or t
  misc_feature (1018)..(1018): n is a, c, g, or t
  misc_feature (1021)..(1021): n is a, c, g, or t
  misc_feature (1025)..(1025): n is a, c, g, or t
  misc_feature (1037)..(1037): n is a, c, g, or t
  misc_feature (1048)..(1048): n is a, c, g, or t
  misc_feature (1060)..(1060): n is a, c, g, or t
  misc_feature (1070)..(1071): n is a, c, g, or t
  misc_feature (1074)..(1074): n is a, c, g, or t
  misc_feature (1088)..(1088): n is a, c, g, or t
  misc_feature (1093)..(1094): n is a, c, g, or t
  misc_feature (1101)..(1104): n is a, c, g, or t
  misc_feature (1107)..(1107): n is a, c, g, or t
  misc_feature (1110)..(1110): n is a, c, g, or t
  misc_feature (1112)..(1112): n is a, c, g, or t
  misc_feature (1117)..(1117): n is a, c, g, or t
  misc_feature (1122)..(1122): n is a, c, g, or t
  misc_feature (1128)..(1128): n is a, c, g, or t
  misc_feature (1143)..(1143): n is a, c, g, or t
  misc_feature (1145)..(1145): n is a, c, g, or t
  misc_feature (1148)..(1150): n is a, c, g, or t
  misc_feature (1153)..(1153): n is a, c, g, or t
  misc_feature (1159)..(1159): n is a, c, g, or t
  misc_feature (1163)..(1163): n is a, c, g, or t
  misc_feature (1165)..(1165): n is a, c, g, or t
  misc_feature (1167)..(1167): n is a, c, g, or t
  misc_feature (1172)..(1172): n is a, c, g, or t
gagaaattactatgagaggatcgcatcaccatcaccatcacggatcctatttaggtgacactatagaatcgtcgacccacgcgtccgctcctccagtgctgtgcgcatggcagtgggctgcctgctggagctggccttcaaggtggctgcaggagagctcaagaatggatttgccatcatccggcccccaggacaccacgccgaggaatccacagccatgggattctgcttcttcaactctgtagccatcaccgcaaaactcctacagcagaagttgaacgtgggcaaggtcctcatcgtggactgggacattcaccatggcaatggcacccagcaggcgttctacaatgacccctctgtgctctacatctctctgcatcgctatgacaacgggaacttctttccaggctctggggctcctgaagaggttggtggaggaccaggcgtggggtacaatgtgaacgtggcatggacaggaggtgtggacccccccattggagacgtggagtaccttacagccttcaggacagtggtgatgcccattgcccacgagttctcacctgatgtggtcctagtctccgccgggtttgatgctgttgaaggacatctgtctcctctgggtggctactctgtcaccgccagatgttttggccacttgaccaggcagctgatgaccctggcagggggccgggtggtgctggccctggagggaggccatgacttgaccgccatctgtgatgcctctgaggcttgtgtctcggctctgctcagtgtaaagctgcagcccttggatgangcagtcttgcagcaaaagcccaacatcaacgcagtggccacgctagaaaaagtcatcgagatccanancaaacactgganctgtgtgcaaaanttcnccgctggtctgggccggtccctgcnanaggcccaancaggtgaaaaccnaagangccnaaactgtgaacnccatggccttgctgtcggtgggggccnaacaagnccaagctgcggnancccnggnaanaaanccccaggccggnaaaagaacccntggaacaagaancctgccctgnnaanccccggcccccatnccctnnggggttnnnnatnggnantttgnttaantttttncaaaaaaaaaaaaantnccnnnttnaaaaangggngncnggggn

SEQ ID NO: 145 - DNA, 1383 bp, Homo Sapiens
  misc_feature (862)..(862): n is a, c, g, or t
  misc_feature (877)..(877): n is a, c, g, or t
  misc_feature (944)..(944): n is a, c, g, or t
  misc_feature (948)..(948): n is a, c, g, or t
  misc_feature (1007)..(1007): n is a, c, g, or t
  misc_feature (1009)..(1009): n is a, c, g, or t
  misc_feature (1020)..(1020): n is a, c, g, or t
  misc_feature (1028)..(1029): n is a, c, g, or t
  misc_feature (1031)..(1031): n is a, c, g, or t
  misc_feature (1035)..(1035): n is a, c, g, or t
  misc_feature (1038)..(1038): n is a, c, g, or t
  misc_feature (1045)..(1045): n is a, c, g, or t
  misc_feature (1057)..(1057): n is a, c, g, or t
  misc_feature (1061)..(1061): n is a, c, g, or t
  misc_feature (1071)..(1072): n is a, c, g, or t
  misc_feature (1079)..(1079): n is a, c, g, or t
  misc_feature (1100)..(1100): n is a, c, g, or t
  misc_feature (1115)..(1115): n is a, c, g, or t
  misc_feature (1121)..(1122): n is a, c, g, or t
  misc_feature (1127)..(1127): n is a, c, g, or t
  misc_feature (1137)..(1137): n is a, c, g, or t
  misc_feature (1151)..(1152): n is a, c, g, or t
  misc_feature (1155)..(1155): n is a, c, g, or t
  misc_feature (1158)..(1158): n is a, c, g, or t
  misc_feature (1171)..(1172): n is a, c, g, or t
  misc_feature (1187)..(1187): n is a, c, g, or t
  misc_feature (1191)..(1191): n is a, c, g, or t
  misc_feature (1198)..(1198): n is a, c, g, or t
  misc_feature (1200)..(1200): n is a, c, g, or t
  misc_feature (1202)..(1203): n is a, c, g, or t
  misc_feature (1212)..(1212): n is a, c, g, or t
  misc_feature (1233)..(1233): n is a, c, g, or t
  misc_feature (1242)..(1242): n is a, c, g, or t
  misc_feature (1244)..(1244): n is a, c, g, or t
  misc_feature (1246)..(1246): n is a, c, g, or t
  misc_feature (1248)..(1248): n is a, c, g, or t
  misc_feature (1255)..(1255): n is a, c, g, or t
  misc_feature (1257)..(1257): n is a, c, g, or t
  misc_feature (1267)..(1268): n is a, c, g, or t
  misc_feature (1271)..(1271): n is a, c, g, or t
  misc_feature (1275)..(1275): n is a, c, g, or t
  misc_feature (1299)..(1299): n is a, c, g, or t
  misc_feature (1328)..(1328): n is a, c, g, or t
  misc_feature (1335)..(1335): n is a, c, g, or t
  misc_feature (1338)..(1338): n is a, c, g, or t
  misc_feature (1340)..(1340): n is a, c, g, or t
  misc_feature (1351)..(1351): n is a, c, g, or t
  misc_feature (1355)..(1355): n is a, c, g, or t
  misc_feature (1361)..(1362): n is a, c, g, or t
  misc_feature (1381)..(1382): n is a, c, g, or t
atagagaaattactatgagaggatcgcatcaccatcaccatcacggatcctatttaggtgacactatagaatcgtcgacccacgcgtccgaccaagcgctccaggggctttgggtttgtcacatatgccactgtggaggaggtggatgcagctatgaatgcaaggccacacaaggtggatggaagagttgtggaaccaaagagagctgtctccagagaagattctcaaagaccaggtgcccacttaactgtgaaaaagatatttgttggtggcattaaagaagacactgaagaacatcacctaagagattattttgaacagtatggaaaaattgaagtgattgaaatcatgactgaccgaggcagtggcaagaaaaggggctttgcctttgtaacctttgacgaccatgactccgtggataagattgtcattcagaaataccatactgtgaatggccacaactgtgaagttagaaaagccctgtcaaagcaagagatggctagtgcttcatccagccaaagaggtcgaagtggttctggaaactttggtggtggtcgtggaggtggtttcggtgggaatgacaacttcggtcgtggaggaaacttcagtggtcgtggtggctttggtggcagccgtggtggtggtggatatggtggcagtggggatggctataatggatttggtaatgatggtggttatggaggaggcggccctggttactctggaggaagcagaggctatggaagtggtggacagggttatggaaaccagggcagtggctatggcgggagtggcagctatgacagctataacaacggaggcggaggcggctttggcggtggtagtggaagcaattttggangtggtggaagctacnatgattttgggaattacaacaatcagtcttcaaattttggacccatgaagggaggaaatttttggangcanaagctctggcccctatggcggtggaaggccaatactttgcaaacccccaaaaccaaggngnctatggcggtnccgccacnncnatanctntggcatngcaaaaaatttnattnggaaaccaanncttaccnggaaaggaaaaccccaaaaantgccagggaaacctnccggtnncaccnatttttgacnccccccaaccccannggnggncaggccccaaccnnctccaaaaaaaactntttnaaaaaancncnnttggttggnccaaaaaaccccgggaccgtnttttggccnantntnaaacagntnttttttttcnnttntggnaaaggtaaacccttccccaagggntttagggaattttttttttccccccggtntttttcnaantnacccccccccncccnaaaaanncttttttagggcgggaaannc

SEQ ID NO: 146 - DNA, 1426 bp, Homo Sapiens
  misc_feature (721)..(721): n is a, c, g, or t
  misc_feature (724)..(724): n is a, c, g, or t
  misc_feature (729)..(729): n is a, c, g, or t
  misc_feature (738)..(738): n is a, c, g, or t
  misc_feature (749)..(749): n is a, c, g, or t
  misc_feature (770)..(770): n is a, c, g, or t
  misc_feature (773)..(773): n is a, c, g, or t
  misc_feature (791)..(791): n is a, c, g, or t
  misc_feature (803)..(803): n is a, c, g, or t
  misc_feature (813)..(813): n is a, c, g, or t
  misc_feature (817)..(817): n is a, c, g, or t
  misc_feature (825)..(825): n is a, c, g, or t
  misc_feature (834)..(834): n is a, c, g, or t
  misc_feature (848)..(849): n is a, c, g, or t
  misc_feature (853)..(853): n is a, c, g, or t
  misc_feature (867)..(867): n is a, c, g, or t
  misc_feature (869)..(869): n is a, c, g, or t
  misc_feature (879)..(879): n is a, c, g, or t
  misc_feature (882)..(882): n is a, c, g, or t
  misc_feature (888)..(888): n is a, c, g, or t
  misc_feature (890)..(890): n is a, c, g, or t
  misc_feature (893)..(893): n is a, c, g, or t
  misc_feature (900)..(900): n is a, c, g, or t
  misc_feature (905)..(905): n is a, c, g, or t
  misc_feature (910)..(910): n is a, c, g, or t
  misc_feature (913)..(913): n is a, c, g, or t
  misc_feature (921)..(921): n is a, c, g, or t
  misc_feature (929)..(929): n is a, c, g, or t
  misc_feature (935)..(935): n is a, c, g, or t
  misc_feature (946)..(946): n is a, c, g, or t
  misc_feature (952)..(952): n is a, c, g, or t
  misc_feature (972)..(972): n is a, c, g, or t
  misc_feature (979)..(979): n is a, c, g, or t
  misc_feature (988)..(988): n is a, c, g, or t
  misc_feature (997)..(997): n is a, c, g, or t
  misc_feature (1000)..(1001): n is a, c, g, or t
  misc_feature (1004)..(1004): n is a, c, g, or t
  misc_feature (1012)..(1012): n is a, c, g, or t
  misc_feature (1022)..(1022): n is a, c, g, or t
  misc_feature (1028)..(1028): n is a, c, g, or t
  misc_feature (1041)..(1041): n is a, c, g, or t
  misc_feature (1044)..(1044): n is a, c, g, or t
  misc_feature (1054)..(1054): n is a, c, g, or t
  misc_feature (1075)..(1075): n is a, c, g, or t
  misc_feature (1080)..(1080): n is a, c, g, or t
  misc_feature (1102)..(1102): n is a, c, g, or t
  misc_feature (1107)..(1107): n is a, c, g, or t
  misc_feature (1110)..(1110): n is a, c, g, or t
  misc_feature (1114)..(1114): n is a, c, g, or t
  misc_feature (1130)..(1130): n is a, c, g, or t
  misc_feature (1132)..(1133): n is a, c, g, or t
  misc_feature (1140)..(1140): n is a, c, g, or t
  misc_feature (1143)..(1143): n is a, c, g, or t
  misc_feature (1145)..(1145): n is a, c, g, or t
  misc_feature (1148)..(1148): n is a, c, g, or t
  misc_feature (1157)..(1157): n is a, c, g, or t
  misc_feature (1163)..(1163): n is a, c, g, or t
  misc_feature (1174)..(1175): n is a, c, g, or t
  misc_feature (1177)..(1177): n is a, c, g, or t
  misc_feature (1179)..(1180): n is a, c, g, or t
  misc_feature (1185)..(1187): n is a, c, g, or t
  misc_feature (1191)..(1192): n is a, c, g, or t
  misc_feature (1198)..(1199): n is a, c, g, or t
  misc_feature (1207)..(1209): n is a, c, g, or t
  misc_feature (1217)..(1217): n is a, c, g, or t
  misc_feature (1223)..(1224): n is a, c, g, or t
  misc_feature (1226)..(1226): n is a, c, g, or t
  misc_feature (1234)..(1236): n is a, c, g, or t
  misc_feature (1238)..(1238): n is a, c, g, or t
  misc_feature (1244)..(1244): n is a, c, g, or t
  misc_feature (1248)..(1248): n is a, c, g, or t
  misc_feature (1258)..(1258): n is a, c, g, or t
  misc_feature (1263)..(1263): n is a, c, g, or t
  misc_feature (1266)..(1268): n is a, c, g, or t
  misc_feature (1271)..(1272): n is a, c, g, or t
  misc_feature (1274)..(1274): n is a, c, g, or t
  misc_feature (1277)..(1278): n is a, c, g, or t
  misc_feature (1282)..(1284): n is a, c, g, or t
  misc_feature (1286)..(1288): n is a, c, g, or t
  misc_feature (1296)..(1297): n is a, c, g, or t
  misc_feature (1299)..(1299): n is a, c, g, or t
  misc_feature (1304)..(1306): n is a, c, g, or t
  misc_feature (1310)..(1311): n is a, c, g, or t
  misc_feature (1315)..(1315): n is a, c, g, or t
  misc_feature (1317)..(1318): n is a, c, g, or t
  misc_feature (1321)..(1321): n is a, c, g, or t
  misc_feature (1332)..(1332): n is a, c, g, or t
  misc_feature (1336)..(1336): n is a, c, g, or t
  misc_feature (1352)..(1352): n is a, c, g, or t
  misc_feature (1356)..(1356): n is a, c, g, or t
  misc_feature (1359)..(1362): n is a, c, g, or t
  misc_feature (1368)..(1368): n is a, c, g, or t
  misc_feature (1372)..(1373): n is a, c, g, or t
  misc_feature (1375)..(1375): n is a, c, g, or t
  misc_feature (1377)..(1377): n is a, c, g, or t
  misc_feature (1381)..(1381): n is a, c, g, or t
  misc_feature (1389)..(1390): n is a, c, g, or t
  misc_feature (1395)..(1395): n is a, c, g, or t
  misc_feature (1397)..(1400): n is a, c, g, or t
  misc_feature (1402)..(1402): n is a, c, g, or t
  misc_feature (1406)..(1406): n is a, c, g, or t
  misc_feature (1408)..(1408): n is a, c, g, or t
  misc_feature (1410)..(1411): n is a, c, g, or t
  misc_feature (1415)..(1415): n is a, c, g, or t
  misc_feature (1418)..(1420): n is a, c, g, or t
  misc_feature (1422)..(1422): n is a, c, g, or t
atagagaaattactatgagaggatcgcatcaccatcaccatcacggatcctatttaggtgacactatagaatcgtcgacccacgcgtccgctccccgccgccgccctcgccatggccgcgccggccccgggcctcatctcggtgttctcgagttcccaggagctgggtgcggcgctagcgcagctggtggcccagcgcgcagcatgctgcctggcaggggcccgcgcccgtttcgcgctcggcctgtcgggcgggagcctcgtctcgatgctagcccgcgagctacccgccgccgtcgcccctgccgggccagctagcttagcgcgctggacgctgggcttctgcgacgagcgcctcgtgcccttcgatcacgccgagagcacgtacggcctctaccggacgcatcttctctccagactgccgatcccagaaagccaggtgatcaccattaaccccgagctgcctgtggaggaggcggctgaggactacgccaagaagctgagacaggcattccaaggggactccatcccggttttcgacctgctgatcctgggggtgggccccgatggtcacacctgctcactcttcccagaccaccccctcctacaggagcgggagaaaattgtggctcccatcagtgactccccgaagccaccgccacagcgtgtgaccctcacactacctgtcctgaatgcacacgaactgtcatctttgtggcaantgnaaaangcaaggcanctgttctgaancgcaattttggaaggaacagnagnaaaaacccgctgccccgnccgcccctggtncaaccccaanaacnggaaaaantggtgctgnttcttggaaaaagnngccncttccctaatattnantcctaaatanacnttaatnanctnaaatttnggaanccctnttnaaaaaatnccataaangacctncaaaaatccantcttgnatttgtttcaaaaaactttnggtttgncccccgggngtttttttnttnnggnaaaaaatncaaactaaanttgggnaaaaatttttcgnaanttaagaaacntaaaatgggaaaaaaaaaaancttgnaaaaacccccttttaaatattncaaanggnatantaaaaaaaaatttttnannaatttancananttntttaaagtnaaacanaaaaaaaaaanntnanntggannntaanncctttnntaaaaacnnnaaaaaaanaaaaannanattttttnnncntttttnaatnttttcccccncaganaannnccnncnaanntttnnntnnnaaaaaaannanaaaannnaaannaaananntcnccattaaaaantttntaaaaaaaaaaaattntttnttnnnnaataanaaanntntnattnataaaaannaaaantnnnnanaaanananntttntcnnnantata

SEQ ID NO: 147 - DNA, 966 bp, Homo Sapiens
ttaactatgagaggtcgcatcaccatcaccatcacggatcctatttaggtgacactatagaatcgtcgacccacgcgtccgaacttgggaaggacagggctgctgctgccagcgacacctcagaaagcatagcctcggcttcctgccccatgtgtccctggaagctgtaccctgactctgcttccagaggccagcagatggtgggttacagacgggtcagcctgccaagtgcacctgagggacctgacctgacacaagccattttgtccctagagcccagctgggactcctgcttctctaggcagggcagagggaggagacacagcacaggcacagagcatgggacagggacccccgagtctggattcaagtcctggccctgctagtaactcatgtgagccagcttgagcaagtcccttcatcttgctagagctcagcttccttgcctataaaacgtaggtggcaatgccctcttcctgaggttgctgggaggataaggcagtgcttgtgaaaaagtctagcgctgtacctggcacagagtagatgcttcatgaatgttgagtctgacaggcaactggagctggtgagaatggggtcccctgactgtcatgccagcctccctcccaggcccactcttcccccctcttccctgaggaaaccaagtctcccttatcaggaagagctgggggagctgggaggaacattacaggaacaccagagggagtctagcgggtgggcaggcttctctctgcagccccctcagcagtttcattccattcctgggctgaacccttgccctggccctgcctcccttctgggtcagcacctcctgacacaggtgtgtgctcagggaccccaggctctagtcctgtactggctgtggaagcctatcactgggacaggaagccagtgggctgcaggagacaggcctcagcgcatctcgtctgtcaggatgggctcacggac

SEQ ID NO: 148 - DNA, 1026 bp, Homo Sapiens
  misc_feature (641)..(641): n is a, c, g, or t
  misc_feature (780)..(780): n is a, c, g, or t
  misc_feature (832)..(832): n is a, c, g, or t
  misc_feature (848)..(848): n is a, c, g, or t
  misc_feature (853)..(853): n is a, c, g, or t
  misc_feature (878)..(878): n is a, c, g, or t
  misc_feature (937)..(937): n is a, c, g, or t
  misc_feature (948)..(948): n is a, c, g, or t
  misc_feature (954)..(954): n is a, c, g, or t
  misc_feature (960)..(960): n is a, c, g, or t
  misc_feature (974)..(974): n is a, c, g, or t
  misc_feature (986)..(986): n is a, c, g, or t
  misc_feature (998)..(998): n is a, c, g, or t
  misc_feature (1023)..(1023): n is a, c, g, or t
  misc_feature (1026)..(1026): n is a, c, g, or t
tagagaaattactatgagaggatcgcatcaccatcaccatcacggatcctatttaggtgacactatagaatcgtcgacccacgcgtccggaagaggcgagaacgacccccggaccgaccaaagcccgcgcgccgctgcatcccgcgtccagcacctacgtcccgctgccgtcgccgccgccaccatgcccaagagaaaggctgaaggggatgctaagggagataaagcaaaggtgaaggacgaaccacagagaagatccgcgaggttgtctgctaaacctgctcctccaaagccagagcccaagcctaaaaaggcccctgcaaagaagggagagaaggtacccaaagggaaaaagggaaaagctgatgctggcaaggaggggaataaccctgcagaaaatggagatgccaaaacagaccaggcacagaaagctgaaggtgctggagatgccaagtgaagtgtgtgcatttttgataactgtgtacttctggtgactgtacagtttgaaatactattttttatcaagttttataaaaatgcagaattttgttttactttttttttttttttaaaagctatgttgttagcacacagaacacttcattgttgtttttgggggaaggggcatatgtcactaatanaatgtctccaaagctggattgatgtggagaaaacacctttcccttctagttttgagagacttcctcttggctcccaggaggagggattccctgactttgacacacatggccaccttggcacaaaagccttgtggtatanaaaaacaaatttgtttttatgtcctcttctccctttccatctttcagcatanacttaactcccttaancccanacatctgttgagacctgacccctantcattggttaccagtgtgtcaggcaatctggactttccagtgatgccactgaaatggcncctgtcaaaanagcagnggttcnatttctaaaattgnggatcttcaaanaaatttctgccnttttccttttccctttccctgaaantcn

SEQ ID NO: 149 - DNA, 591 bp, Homo Sapiens
  misc_feature (564)..(564): n is a, c, g, or t
  misc_feature (568)..(568): n is a, c, g, or t
  misc_feature (576)..(578): n is a, c, g, or t
  misc_feature (586)..(588): n is a, c, g, or t
agaaattactatgagaggatcgcatcaccatcaccatcacggatcctatttaggtgacactatagaatcgtcgacccacgcgtccgcgggtgccggtgcgcacggagccgagccggggctcccgttgcgctgcaccgcgttgggtcggagtcccaggacttcagcggagatccgcgcgctgcgacggccggtgcagagcccgccgagcgcccagtcccggcccggggctgagttgggggcatgctctagccgcccccccggagcccgggagagaacccaggagcgccgccgcccagccccagcgccccgagcggaaccgctgcgaaggggccctgaacggccgtcgccctccctacgggcagcccccgggggttggcgaccgaagtctaggttttcgagaaagccagggtgggaaccctaactggactcttcgggacccccaggaaggatctgaggcctgagccatcctcctttctaccctgtctgccccccaggactgggcagttgcaggaggccctggggggcagacagggtagaaaggaggatggctcaggcctcagatcnttcntgggggtnnngaagagtnnngtt

SEQ ID NO: 150 - DNA, 1358 bp, Homo Sapiens
  misc_feature (2)..(2): n is a, c, g, or t
  misc_feature (800)..(800): n is a, c, g, or t
  misc_feature (869)..(869): n is a, c, g, or t
  misc_feature (879)..(880): n is a, c, g, or t
  misc_feature (896)..(896): n is a, c, g, or t
  misc_feature (910)..(910): n is a, c, g, or t
  misc_feature (917)..(917): n is a, c, g, or t
  misc_feature (922)..(922): n is a, c, g, or t
  misc_feature (926)..(927): n is a, c, g, or t
  misc_feature (929)..(929): n is a, c, g, or t
  misc_feature (934)..(934): n is a, c, g, or t
  misc_feature (938)..(938): n is a, c, g, or t
  misc_feature (943)..(943): n is a, c, g, or t
  misc_feature (948)..(948): n is a, c, g, or t
  misc_feature (953)..(953): n is a, c, g, or t
  misc_feature (960)..(960): n is a, c, g, or t
  misc_feature (971)..(971): n is a, c, g, or t
  misc_feature (973)..(973): n is a, c, g, or t
  misc_feature (983)..(983): n is a, c, g, or t
  misc_feature (986)..(986): n is a, c, g, or t
  misc_feature (994)..(994): n is a, c, g, or t
  misc_feature (1008)..(1008): n is a, c, g, or t
  misc_feature (1012)..(1012): n is a, c, g, or t
  misc_feature (1014)..(1014): n is a, c, g, or t
  misc_feature (1018)..(1020): n is a, c, g, or t
  misc_feature (1022)..(1022): n is a, c, g, or t
  misc_feature (1024)..(1025): n is a, c, g, or t
  misc_feature (1029)..(1030): n is a, c, g, or t
  misc_feature (1032)..(1032): n is a, c, g, or t
  misc_feature (1034)..(1034): n is a, c, g, or t
  misc_feature (1039)..(1039): n is a, c, g, or t
  misc_feature (1043)..(1043): n is a, c, g, or t
  misc_feature (1045)..(1045): n is a, c, g, or t
  misc_feature (1048)..(1048): n is a, c, g, or t
  misc_feature (1053)..(1053): n is a, c, g, or t
  misc_feature (1059)..(1061): n is a, c, g, or t
  misc_feature (1066)..(1069): n is a, c, g, or t
  misc_feature (1073)..(1073): n is a, c, g, or t
  misc_feature (1078)..(1078): n is a, c, g, or t
  misc_feature (1082)..(1082): n is a, c, g, or t
  misc_feature (1085)..(1085): n is a, c, g, or t
  misc_feature (1089)..(1089): n is a, c, g, or t
  misc_feature (1092)..(1093): n is a, c, g, or t
  misc_feature (1099)..(1099): n is a, c, g, or t
  misc_feature (1104)..(1104): n is a, c, g, or t
  misc_feature (1109)..(1110): n is a, c, g, or t
  misc_feature (1112)..(1112): n is a, c, g, or t
  misc_feature (1115)..(1115): n is a, c, g, or t
  misc_feature (1117)..(1117): n is a, c, g, or t
  misc_feature (1128)..(1128): n is a, c, g, or t
  misc_feature (1137)..(1137): n is a, c, g, or t
  misc_feature (1143)..(1143): n is a, c, g, or t
  misc_feature (1149)..(1149): n is a, c, g, or t
  misc_feature (1152)..(1152): n is a, c, g, or t
  misc_feature (1159)..(1159): n is a, c, g, or t
  misc_feature (1166)..(1167): n is a, c, g, or t
  misc_feature (1176)..(1176): n is a, c, g, or t
  misc_feature (1183)..(1183): n is a, c, g, or t
  misc_feature (1185)..(1186): n is a, c, g, or t
  misc_feature (1190)..(1190): n is a, c, g, or t
  misc_feature (1197)..(1197): n is a, c, g, or t
  misc_feature (1202)..(1202): n is a, c, g, or t
  misc_feature (1205)..(1208): n is a, c, g, or t
  misc_feature (1216)..(1217): n is a, c, g, or t
  misc_feature (1221)..(1221): n is a, c, g, or t
  misc_feature (1224)..(1226): n is a, c, g, or t
  misc_feature (1229)..(1229): n is a, c, g, or t
  misc_feature (1232)..(1234): n is a, c, g, or t
  misc_feature (1236)..(1237): n is a, c, g, or t
  misc_feature (1239)..(1239): n is a, c, g, or t
  misc_feature (1244)..(1244): n is a, c, g, or t
  misc_feature (1249)..(1250): n is a, c, g, or t
  misc_feature (1252)..(1252): n is a, c, g, or t
  misc_feature (1258)..(1258): n is a, c, g, or t
  misc_feature (1276)..(1276): n is a, c, g, or t
  misc_feature (1278)..(1280): n is a, c, g, or t
  misc_feature (1283)..(1285): n is a, c, g, or t
  misc_feature (1289)..(1291): n is a, c, g, or t
  misc_feature (1299)..(1299): n is a, c, g, or t
  misc_feature (1301)..(1301): n is a, c, g, or t
  misc_feature (1303)..(1303): n is a, c, g, or t
  misc_feature (1307)..(1307): n is a, c, g, or t
  misc_feature (1309)..(1310): n is a, c, g, or t
  misc_feature (1318)..(1320): n is a, c, g, or t
  misc_feature (1323)..(1323): n is a, c, g, or t
  misc_feature (1326)..(1326): n is a, c, g, or t
  misc_feature (1328)..(1329): n is a, c, g, or t
  misc_feature (1331)..(1332): n is a, c, g, or t
  misc_feature (1337)..(1337): n is a, c, g, or t
  misc_feature (1339)..(1341): n is a, c, g, or t
  misc_feature (1345)..(1346): n is a, c, g, or t
  misc_feature (1351)..(1354): n is a, c, g, or t
  misc_feature (1357)..(1357): n is a, c, g, or t
cnaatagagagaattactatgagaggatcgcatcaccatcaccatcacggatcctatttaggtgacactatagaatcgtcgacccacgcgtccgcccacgcgtccgcccacgcgtccgaggctagcctgcgagccacctcctctactcagtctctagctcgcctgggttctcccgattatggcaactcagccctgctcagcttgcctggctaccgccccaccactcgcagttctgctcgtcgttcccaggccggggtgtccagtggggcccctccaggaaggaacagcttctacatgggcacttgccaggatgagcctgagcagctggatgactggaaccgcattgcagagctgcagcagcgcaatcgagtgtgccccccacatctgaagacctgctatcccctggagtccaggccttccctgagcctgggcaccatcacagatgaggagatgaaaactggagacccccaagagaccctgcgccgagccagcatgcagccaatccagatagccgagggcactggcatcaccacccggcagcagcgcaaacgggtctccctagagccccaccagggccctggaactcctgagtctaagaaggccaccagctgtttcccacgccccatgactccccgagaccgacatgaagggcgcaaacagagcactactgaggcccagaagaaagcagctccagcttctactaaacaggctgaccggcgccagtcgatggccttcagcatcctcaacacacccaagaagctagggaacagccttctgcggcggggagcctcaaagaaggncctgtccaaggcttcccccaacactcgcagtggaacccgccgttctccgcgcattgccaccaccacagncagcgccgcnntgctgccgccattggngccacccctcgagncaagggnaaggnaaannantaaangggncaatnaccantgagnggcccanctgtgtccccnangctgccgtanctnggtctccncccaaatgtccctntaangncttnnntnanntccnngncnaaaantaancnaanccctnaaaaannnatgcnnnncccnacccnggcnggncccnggnnctttantgggnccttnntnaantngcccaaggggnctgaaaaangaaaangggggnccntccccancttgccnnttttttttnaaaaaantnntttncctaaancaaanttnnnngggttttnnaggnggnnnttnggnnngnnanttttntttanntnggaatnaaaagaaaaaaaaaaaancnnnttnnntttnnngggggggncnanaggncnntttttaannnaangtntnnannggaancnnnaaannttttnnnngang

SEQ ID NO: 151 - DNA, 889 bp, Homo Sapiens
  misc_feature (711)..(711): n is a, c, g, or t
  misc_feature (714)..(714): n is a, c, g, or t
  misc_feature (736)..(736): n is a, c, g, or t
  misc_feature (742)..(742): n is a, c, g, or t
  misc_feature (777)..(777): n is a, c, g, or t
  misc_feature (782)..(782): n is a, c, g, or t
  misc_feature (814)..(814): n is a, c, g, or t
  misc_feature (816)..(816): n is a, c, g, or t
  misc_feature (822)..(822): n is a, c, g, or t
  misc_feature (844)..(844): n is a, c, g, or t
  misc_feature (849)..(850): n is a, c, g, or t
  misc_feature (852)..(852): n is a, c, g, or t
  misc_feature (855)..(855): n is a, c, g, or t
  misc_feature (861)..(861): n is a, c, g, or t
  misc_feature (865)..(865): n is a, c, g, or t
  misc_feature (868)..(868): n is a, c, g, or t
  misc_feature (873)..(873): n is a, c, g, or t
  misc_feature (880)..(880): n is a, c, g, or t
  misc_feature (882)..(882): n is a, c, g, or t
gagaaattactatgagaggatcgcatcaccatcaccatcacggatcctatttaggtgacactatagaatcgtcgacccacgcgtccgcctgcgtcgctccgggagctgccgacggacggagcgcccccgcccccgcccggccgcccgcccgccgccgccatgcccttctccaacagccacaacgcactgaagctgcgcttcccggccgaggacgagttccccgacctgagcgcccacaacaaccacatggccaaggtgctgacccccgagctgtacgcggagctgcgcgccaagagcacgccgagcggcttcacgctggacgacgtcatccagacaggcgtggacaacccgggccacccgtacatcatgaccgtgggctgcgtggcgggcgacgaggagtcctacgaagtgttcaaggatctcttcgaccccatcatcgaggaccggcacggcggctacaagcccagcgatgagcacaagaccgacctcaaccccgacaacctgcagggcggcgacgacctggaccccaactacgtgctgagctcgcgggtgcgcacgggccgcagcatccgtggcttctgcctccccccgcactgcagccgcggggagcgccgagccatcgagaagctcgcggtggaagccctgtccagcctggacggcgacctggcgggccgatactacgcgctcaagagcatgacggaggcggagcancancagctcatcgacgaccacttcntcttcnacaagcccgtgtcgcccctgctgctggcctcgggnatggnccgcgactggcccgacgcccgcggtatctggnanaatganaataaaaccttcctggtgtggntcaannangangaccanctgnggntcatntccatgnanaaggggg

SEQ ID NO: 152 - DNA, 177 bp, Homo Sapiens
tttaactatgagaggatcgcatcaccatcaccatcacggatcctatttaggtgacactatagaatcgtcgacccacgcgtccggtcgccatgttgtcggtagcagcccgctcgggcccgttcgcgcccgtcctgtcggccacgtcccgcggggtggcgggcgcgctgcggcccttgc

SEQ ID NO: 153 - DNA, 1389 bp, Homo Sapiens
  misc_feature (641)..(641): n is a, c, g, or t
  misc_feature (874)..(874): n is a, c, g, or t
  misc_feature (885)..(885): n is a, c, g, or t
  misc_feature (908)..(908): n is a, c, g, or t
  misc_feature (918)..(918): n is a, c, g, or t
  misc_feature (923)..(923): n is a, c, g, or t
  misc_feature (927)..(927): n is a, c, g, or t
  misc_feature (944)..(944): n is a, c, g, or t
  misc_feature (947)..(947): n is a, c, g, or t
  misc_feature (957)..(957): n is a, c, g, or t
  misc_feature (969)..(969): n is a, c, g, or t
  misc_feature (974)..(974): n is a, c, g, or t
  misc_feature (976)..(976): n is a, c, g, or t
  misc_feature (984)..(984): n is a, c, g, or t
  misc_feature (989)..(989): n is a, c, g, or t
  misc_feature (999)..(999): n is a, c, g, or t
  misc_feature (1002)..(1002): n is a, c, g, or t
  misc_feature (1007)..(1007): n is a, c, g, or t
  misc_feature (1014)..(1014): n is a, c, g, or t
  misc_feature (1022)..(1022): n is a, c, g, or t
  misc_feature (1029)..(1029): n is a, c, g, or t
  misc_feature (1035)..(1035): n is a, c, g, or t
  misc_feature (1038)..(1038): n is a, c, g, or t
  misc_feature (1043)..(1043): n is a, c, g, or t
  misc_feature (1045)..(1046): n is a, c, g, or t
  misc_feature (1052)..(1052): n is a, c, g, or t
  misc_feature (1055)..(1055): n is a, c, g, or t
  misc_feature (1064)..(1064): n is a, c, g, or t
  misc_feature (1066)..(1066): n is a, c, g, or t
  misc_feature (1070)..(1070): n is a, c, g, or t
  misc_feature (1073)..(1073): n is a, c, g, or t
  misc_feature (1081)..(1081): n is a, c, g, or t
  misc_feature (1083)..(1083): n is a, c, g, or t
  misc_feature (1086)..(1086): n is a, c, g, or t
  misc_feature (1093)..(1093): n is a, c, g, or t
  misc_feature (1099)..(1099): n is a, c, g, or t
  misc_feature (1105)..(1105): n is a, c, g, or t
  misc_feature (1108)..(1108): n is a, c, g, or t
  misc_feature (1114)..(1114): n is a, c, g, or t
  misc_feature (1118)..(1119): n is a, c, g, or t
  misc_feature (1127)..(1127): n is a, c, g, or t
  misc_feature (1132)..(1132): n is a, c, g, or t
  misc_feature (1134)..(1134): n is a, c, g, or t
  misc_feature (1136)..(1136): n is a, c, g, or t
  misc_feature (1147)..(1147): n is a, c, g, or t
  misc_feature (1155)..(1156): n is a, c, g, or t
  misc_feature (1158)..(1158): n is a, c, g, or t
  misc_feature (1162)..(1163): n is a, c, g, or t
  misc_feature (1167)..(1167): n is a, c, g, or t
  misc_feature (1170)..(1170): n is a, c, g, or t
  misc_feature (1177)..(1177): n is a, c, g, or t
  misc_feature (1180)..(1183): n is a, c, g, or t
  misc_feature (1185)..(1185): n is a, c, g, or t
  misc_feature (1187)..(1187): n is a, c, g, or t
  misc_feature (1195)..(1196): n is a, c, g, or t
  misc_feature (1203)..(1203): n is a, c, g, or t
  misc_feature (1211)..(1211): n is a, c, g, or t
  misc_feature (1216)..(1216): n is a, c, g, or t
  misc_feature (1219)..(1220): n is a, c, g, or t
  misc_feature (1223)..(1233): n is a, c, g, or t
  misc_feature (1238)..(1239): n is a, c, g, or t
  misc_feature (1244)..(1244): n is a, c, g, or t
  misc_feature (1247)..(1250): n is a, c, g, or t
  misc_feature (1252)..(1252): n is a, c, g, or t
  misc_feature (1254)..(1256): n is a, c, g, or t
  misc_feature (1258)..(1258): n is a, c, g, or t
  misc_feature (1260)..(1260): n is a, c, g, or t
  misc_feature (1263)..(1266): n is a, c, g, or t
  misc_feature (1270)..(1272): n is a, c, g, or t
  misc_feature (1276)..(1276): n is a, c, g, or t
  misc_feature (1285)..(1285): n is a, c, g, or t
  misc_feature (1290)..(1290): n is a, c, g, or t
  misc_feature (1292)..(1292): n is a, c, g, or t
  misc_feature (1295)..(1295): n is a, c, g, or t
  misc_feature (1302)..(1302): n is a, c, g, or t
  misc_feature (1304)..(1304): n is a, c, g, or t
  misc_feature (1307)..(1314): n is a, c, g, or t
  misc_feature (1316)..(1317): n is a, c, g, or t
  misc_feature (1321)..(1322): n is a, c, g, or t
  misc_feature (1328)..(1328): n is a, c, g, or t
  misc_feature (1332)..(1340): n is a, c, g, or t
  misc_feature (1345)..(1346): n is a, c, g, or t
  misc_feature (1353)..(1355): n is a, c, g, or t
  misc_feature (1360)..(1364): n is a, c, g, or t
  misc_feature (1366)..(1366): n is a, c, g, or t
  misc_feature (1369)..(1372): n is a, c, g, or t
  misc_feature (1375)..(1376): n is a, c, g, or t
  misc_feature (1378)..(1378): n is a, c, g, or t
  misc_feature (1381)..(1386): n is a, c, g, or t
  misc_feature (1389)..(1389): n is a, c, g, or t
tagagaaattaactatgagaggatcgcatcaccatcaccatcacggatcctatttaggtgacactatagaatcgtcgacccacgcgtccgggctcggggcgccgaggcttccgcgcccgctggttcctcgctccggggcggagctcgcgatagcgaccgggagcagggcgcggggcgggacccaggtccgaggcgaggaagccggaagccaggcgcggggagcctcccccttcgactgcagcctcgctccgtgccttctgcgcgcctgggatcccggagcctgcctaggttctgtgcgctcccgcccaggccggtgcccgccgcccgcctgcgccccaggcaggtcccaggcctccggctgctcccggccgaaggtggggacaggcagtggcaggcaccactagcgagggcgtttgggaacccagggtgaccacggcgcagccatggggaccgcgcttgtgtaccatgaggacatgacggccacccggctgctctgggacgagtaagtgggacctggccgaggtggggtgcggggagggacctctgaactgagctcctcatctgccccagccccgagtgcgagatcgagcgtcctgagcgcctgaccgcagccctggatcgcctgcggcagcgcggcctgnaacagaggtgtctgcggttgtcagcccgcgaggcctcggaagaggagctgggcctggtgcacagagtacctttcactgcgcgcggctggccgcaggggctggactgcagctggtggacgctgtgctcactggagctgtgcaaaatgggcttgccctggtgaggcctcccgggcaccatggccagaaggcggctgccaacgggttctgcgtgttcaacaacgtggccataacanctgcacatgcnaacaaaaacacgggctaaacagnatcctcgtcntgaantggnatgtgcaccatggccanggnatccaatatntcttttaagatnacccnancgtctttnatttntcttggaacnctnttaanatgggcnctttggcntttctgnaaaatnaancaaancnntggggnggnaaaggcctngntttnttntaaactgncntgnaaacaanttgganggaaanctnaataanggtnnctttctgnactgntntnccatggctttnaaatttanncncccnncggnacnttaaggnaannnngncncccaaaannttttccncttaaaanttttnaannttnnnnnnnnnnnttttnnttttnaannnntncnnntnanttnnnnaaannntttnaaaaaaaantttgngnacnccccccntnggnnnnnnnntnnaaannaaaaanaaannnnnnnnnccccnnaaaaacnnnaaaannnnntnaannnnccnnanaannnnnnttn

SEQ ID NO: 154 - DNA, 1308 bp, Homo Sapiens
  misc_feature (904)..(904): n is a, c, g, or t
  misc_feature (917)..(917): n is a, c, g, or t
  misc_feature (936)..(936): n is a, c, g, or t
  misc_feature (957)..(957): n is a, c, g, or t
  misc_feature (960)..(960): n is a, c, g, or t
  misc_feature (969)..(969): n is a, c, g, or t
  misc_feature (983)..(983): n is a, c, g, or t
  misc_feature (988)..(988): n is a, c, g, or t
  misc_feature (990)..(990): n is a, c, g, or t
  misc_feature (994)..(994): n is a, c, g, or t
  misc_feature (1007)..(1007): n is a, c, g, or t
  misc_feature (1013)..(1013): n is a, c, g, or t
  misc_feature (1022)..(1022): n is a, c, g, or t
  misc_feature (1040)..(1040): n is a, c, g, or t
  misc_feature (1066)..(1066): n is a, c, g, or t
  misc_feature (1069)..(1069): n is a, c, g, or t
  misc_feature (1082)..(1083): n is a, c, g, or t
  misc_feature (1089)..(1089): n is a, c, g, or t
  misc_feature (1093)..(1093): n is a, c, g, or t
  misc_feature (1108)..(1108): n is a, c, g, or t
  misc_feature (1110)..(1110): n is a, c, g, or t
  misc_feature (1118)..(1118): n is a, c, g, or t
  misc_feature (1121)..(1121): n is a, c, g, or t
  misc_feature (1131)..(1132): n is a, c, g, or t
  misc_feature (1137)..(1137): n is a, c, g, or t
  misc_feature (1141)..(1141): n is a, c, g, or t
  misc_feature (1148)..(1148): n is a, c, g, or t
  misc_feature (1150)..(1151): n is a, c, g, or t
  misc_feature (1156)..(1156): n is a, c, g, or t
  misc_feature (1163)..(1163): n is a, c, g, or t
  misc_feature (1166)..(1166): n is a, c, g, or t
  misc_feature (1175)..(1175): n is a, c, g, or t
  misc_feature (1186)..(1186): n is a, c, g, or t
  misc_feature (1188)..(1188): n is a, c, g, or t
  misc_feature (1194)..(1194): n is a, c, g, or t
  misc_feature (1197)..(1197): n is a, c, g, or t
  misc_feature (1201)..(1201): n is a, c, g, or t
  misc_feature (1203)..(1204): n is a, c, g, or t
  misc_feature (1212)..(1213): n is a, c, g, or t
  misc_feature (1215)..(1215): n is a, c, g, or t
  misc_feature (1217)..(1217): n is a, c, g, or t
  misc_feature (1221)..(1221): n is a, c, g, or t
  misc_feature (1243)..(1243): n is a, c, g, or t
  misc_feature (1250)..(1250): n is a, c, g, or t
  misc_feature (1263)..(1263): n is a, c, g, or t
  misc_feature (1276)..(1276): n is a, c, g, or t
  misc_feature (1281)..(1281): n is a, c, g, or t
  misc_feature (1283)..(1283): n is a, c, g, or t
  misc_feature (1285)..(1286): n is a, c, g, or t
  misc_feature (1298)..(1298): n is a, c, g, or t
attagagaaaattactatgagaggatcgcatcaccatcaccatcacggatcctatttaggtgacactatagaatcgtcgacccacgcgtccgcaactgaagaagaaattcaggaaatctgcttaaagatcttgcagctttatgctcggaaaaaggttgatctcacacacctggagggtgaagtggaaaaaagaaagcacgctatcgaagaggcaaaggcccaagcccggggcctgttgcctgggggcacacaggtgctggatggtacctcggggttctctcctgcccccaagctggtggaatcccccaaagaaggtaaagggagcaagccttccccactgtctgtgaagaacaccaagaggaggctggagggcgccaagaaagccaaggcggacagccccgtgaacggcttgccaaaggggcgagagagtcggagtcggagccggagccgtgagcagagctactcgaggtccccatcccgatcagcgtctcctaagaggaggaaaagtgacagcggctccacatctggtgggtccaagtcgcagagccgctcccggagcaggagtgactccccaccgagacaggccccccgcagcgctccctacaaaggctctgagattcggggctcccggaagtccaaggactgcaagtacccccagaagccacacaagtctcggagccggagttcttcccgttctcgaagcaggtcacgggagcgggcggataatccgggaaaatacaagaagaaaagtcattactacagagatcagcgacgagagcgctcgaggtcgtatgaacgcacaggccgtcgctatgagcgggaccaccctgggcacagcagggcatcggaggtgaggcggggttgcagtgactgggtggccgcagcccttccctggggaagtacntgatggctgcccntttgacccccggtggctgnccctttgacccccggggtgtngcntcttcaccncaaagtgggtcctnaaaanangaanttcctttttttgnaaattnttttgttcnaacttggaaaccttgggngggaattttggaaaattgggaaattnganggggaaccgggtnnaaaccnttgnttttcaaaaccgggntnctgggggnttncgggcccaannccttngggnccccgtngnnagggnttctaanttntgggaaacnatcttttttgnangggccnccntctntnnaaaaaaanntntnatgncccccccccccctttttttggngcgtggnccctggccatggncctgggtggtttntttgnananncccttttttccncttcccccaa

SEQ ID NO: 155 - DNA, 1458 bp, Homo Sapiens
  misc_feature (796)..(796): n is a, c, g, or t
  misc_feature (849)..(849): n is a, c, g, or t
  misc_feature (852)..(852): n is a, c, g, or t
  misc_feature (920)..(920): n is a, c, g, or t
  misc_feature (942)..(942): n is a, c, g, or t
  misc_feature (961)..(961): n is a, c, g, or t
  misc_feature (964)..(964): n is a, c, g, or t
  misc_feature (967)..(967): n is a, c, g, or t
  misc_feature (974)..(974): n is a, c, g, or t
  misc_feature (978)..(979): n is a, c, g, or t
  misc_feature (986)..(986): n is a, c, g, or t
  misc_feature (988)..(988): n is a, c, g, or t
  misc_feature (994)..(994): n is a, c, g, or t
  misc_feature (997)..(997): n is a, c, g, or t
  misc_feature (999)..(999): n is a, c, g, or t
  misc_feature (1007)..(1007): n is a, c, g, or t
  misc_feature (1012)..(1012): n is a, c, g, or t
  misc_feature (1034)..(1034): n is a, c, g, or t
  misc_feature (1046)..(1046): n is a, c, g, or t
  misc_feature (1052)..(1053): n is a, c, g, or t
  misc_feature (1057)..(1057): n is a, c, g, or t
  misc_feature (1063)..(1063): n is a, c, g, or t
  misc_feature (1065)..(1065): n is a, c, g, or t
  misc_feature (1071)..(1072): n is a, c, g, or t
  misc_feature (1077)..(1077): n is a, c, g, or t
  misc_feature (1080)..(1080): n is a, c, g, or t
  misc_feature (1082)..(1082): n is a, c, g, or t
  misc_feature (1084)..(1084): n is a, c, g, or t
  misc_feature (1110)..(1110): n is a, c, g, or t
  misc_feature (1118)..(1118): n is a, c, g, or t
  misc_feature (1120)..(1120): n is a, c, g, or t
  misc_feature (1125)..(1125): n is a, c, g, or t
  misc_feature (1140)..(1141): n is a, c, g, or t
  misc_feature (1144)..(1144): n is a, c, g, or t
  misc_feature (1148)..(1148): n is a, c, g, or t
  misc_feature (1154)..(1154): n is a, c, g, or t
  misc_feature (1157)..(1157): n is a, c, g, or t
  misc_feature (1165)..(1165): n is a, c, g, or t
  misc_feature (1174)..(1174): n is a, c, g, or t
  misc_feature (1183)..(1184): n is a, c, g, or t
  misc_feature (1188)..(1188): n is a, c, g, or t
  misc_feature (1191)..(1191): n is a, c, g, or t
  misc_feature (1209)..(1209): n is a, c, g, or t
  misc_feature (1211)..(1212): n is a, c, g, or t
  misc_feature (1225)..(1225): n is a, c, g, or t
  misc_feature (1230)..(1231): n is a, c, g, or t
  misc_feature (1234)..(1234): n is a, c, g, or t
  misc_feature (1239)..(1239): n is a, c, g, or t
  misc_feature (1248)..(1248): n is a, c, g, or t
  misc_feature (1250)..(1250): n is a, c, g, or t
  misc_feature (1252)..(1252): n is a, c, g, or t
  misc_feature (1254)..(1255): n is a, c, g, or t
  misc_feature (1258)..(1258): n is a, c, g, or t
  misc_feature (1260)..(1260): n is a, c, g, or t
  misc_feature (1262)..(1264): n is a, c, g, or t
  misc_feature (1272)..(1272): n is a, c, g, or t
  misc_feature (1274)..(1274): n is a, c, g, or t
  misc_feature (1276)..(1276): n is a, c, g, or t
  misc_feature (1302)..(1302): n is a, c, g, or t
  misc_feature (1307)..(1307): n is a, c, g, or t
  misc_feature (1321)..(1321): n is a, c, g, or t
  misc_feature (1323)..(1324): n is a, c, g, or t
  misc_feature (1330)..(1330): n is a, c, g, or t
  misc_feature (1341)..(1341): n is a, c, g, or t
  misc_feature (1345)..(1345): n is a, c, g, or t
  misc_feature (1348)..(1348): n is a, c, g, or t
  misc_feature (1352)..(1352): n is a, c, g, or t
  misc_feature (1355)..(1356): n is a, c, g, or t
  misc_feature (1363)..(1364): n is a, c, g, or t
  misc_feature (1368)..(1368): n is a, c, g, or t
  misc_feature (1371)..(1371): n is a, c, g, or t
  misc_feature (1373)..(1375): n is a, c, g, or t
  misc_feature (1379)..(1379): n is a, c, g, or t
  misc_feature (1382)..(1382): n is a, c, g, or t
  misc_feature (1388)..(1389): n is a, c, g, or t
  misc_feature (1409)..(1409): n is a, c, g, or t
  misc_feature (1413)..(1413): n is a, c, g, or t
  misc_feature (1419)..(1419): n is a, c, g, or t
  misc_feature (1426)..(1426): n is a, c, g, or t
  misc_feature (1428)..(1428): n is a, c, g, or t
  misc_feature (1434)..(1434): n is a, c, g, or t
  misc_feature (1437)..(1437): n is a, c, g, or t
  misc_feature (1439)..(1439): n is a, c, g, or t
  misc_feature (1442)..(1442): n is a, c, g, or t
  misc_feature (1447)..(1447): n is a, c, g, or t
  misc_feature (1452)..(1452): n is a, c, g, or t
gaatagagaaattactatgagaggatcgcatcaccatcaccatcacggatcctatttaggtgacactatagaatcgtcgacccacgcgtccgagttcaaggagctgctgaccaaaaagggcagctacagatactacttcaagaaagtgagcgacgagtttgactgtggggtggtgtttgaggaggttcgagaggacgaggccgtcctgcccgtctttgaggagaagatcatcggcaaagtggagaaggtggactgataggctggtgggctggccgctgtgccaggcgaggcccttggcgggcacgggtgtcacggccaggcagatgacctcgtactcaggagcccgatggggaacagtgttgggtgtaccacccatccctgtggtctacccgtgtctagaggcaggtagggggtccctccaagtggtccacaagcttctgtcctgcccccaaggaggcagcctggaccactcctcatagcaatacttggagggcccagcccaagtggggcagccgaggtccctgctgccagcttcaggtgacccccccccatcccccggcacctcccttgggcacgtgtgctgggatctactttccctctgggatttgcccacgtacccaggtctggctggggcccaggcccggatgcagaggcctgcagggcctctgtcaattgtacgcgccaccgagtgccttcaacccagcttgtctcttgcctgccactgtgtgaatcggcgacggagcactgcacctgcctccagccgccggctgtgcagtcctgggtcctcctttctganggcccgtgtaaatatgtacattttctcaggctagggccagcaggggctgcccnaantctgtttttcatgcgatgacacttgtacaattattctttttcaaagggtacttggataataatgaaanaaaaactgttttttaaacctgnaaaaaaaaaaaaaaaaggncgnccncctcccnaaannggagtcntnattaanctnanttaacttnaactnggactcctgtttgataaatccngtaatgaacccncaaaanntccntcttgnantttttnnaaaanccncngnttcccccccgggcgttttttttttgntaaaatcnancctancttggcgaaaatttnnggnattnaggaanctnaaattggnaaaaaaaanccctggaanncccnccnttaaaatttcccaatggntnntaaaaaaattttngagcnnttnacccnttttccaanancnannaanancnnntcacttgnantnacccctttttaaaacccaaaaaaaanaaccnatttttccgccttntnnattttncccccgaaaancccnccnattnttnnaaaaaanngaancgnannnaaanttncctttnncctttttaaaaaaaattttncccntgaaanaaaattngntttaanttnanaanggggnaaaancttttc

SEQ ID NO: 156 - DNA, 1345 bp, Homo Sapiens
  misc_feature (933)..(933): n is a, c, g, or t
  misc_feature (962)..(962): n is a, c, g, or t
  misc_feature (977)..(977): n is a, c, g, or t
  misc_feature (980)..(980): n is a, c, g, or t
  misc_feature (1005)..(1005): n is a, c, g, or t
  misc_feature (1021)..(1021): n is a, c, g, or t
  misc_feature (1039)..(1039): n is a, c, g, or t
  misc_feature (1062)..(1062): n is a, c, g, or t
  misc_feature (1074)..(1074): n is a, c, g, or t
  misc_feature (1089)..(1089): n is a, c, g, or t
  misc_feature (1093)..(1093): n is a, c, g, or t
  misc_feature (1096)..(1096): n is a, c, g, or t
  misc_feature (1099)..(1099): n is a, c, g, or t
  misc_feature (1103)..(1104): n is a, c, g, or t
  misc_feature (1106)..(1106): n is a, c, g, or t
  misc_feature (1110)..(1110): n is a, c, g, or t
  misc_feature (1112)..(1113): n is a, c, g, or t
  misc_feature (1117)..(1117): n is a, c, g, or t
  misc_feature (1124)..(1124): n is a, c, g, or t
  misc_feature (1136)..(1136): n is a, c, g, or t
  misc_feature (1139)..(1140): n is a, c, g, or t
  misc_feature (1142)..(1143): n is a, c, g, or t
  misc_feature (1165)..(1165): n is a, c, g, or t
  misc_feature (1180)..(1180): n is a, c, g, or t
  misc_feature (1184)..(1184): n is a, c, g, or t
  misc_feature (1186)..(1186): n is a, c, g, or t
  misc_feature (1189)..(1189): n is a, c, g, or t
  misc_feature (1192)..(1192): n is a, c, g, or t
  misc_feature (1194)..(1194): n is a, c, g, or t
  misc_feature (1206)..(1206): n is a, c, g, or t
  misc_feature (1210)..(1211): n is a, c, g, or t
  misc_feature (1222)..(1222): n is a, c, g, or t
  misc_feature (1226)..(1226): n is a, c, g, or t
  misc_feature (1228)..(1229): n is a, c, g, or t
  misc_feature (1237)..(1238): n is a, c, g, or t
  misc_feature (1248)..(1248): n is a, c, g, or t
  misc_feature (1253)..(1253): n is a, c, g, or t
  misc_feature (1257)..(1257): n is a, c, g, or t
  misc_feature (1260)..(1262): n is a, c, g, or t
  misc_feature (1266)..(1268): n is a, c, g, or t
  misc_feature (1270)..(1270): n is a, c, g, or t
  misc_feature (1274)..(1275): n is a, c, g, or t
  misc_feature (1279)..(1280): n is a, c, g, or t
  misc_feature (1287)..(1289): n is a, c, g, or t
  misc_feature (1291)..(1292): n is a, c, g, or t
  misc_feature (1298)..(1298): n is a, c, g, or t
  misc_feature (1307)..(1307): n is a, c, g, or t
  misc_feature (1311)..(1312): n is a, c, g, or t
  misc_feature (1316)..(1320): n is a, c, g, or t
  misc_feature (1323)..(1324): n is a, c, g, or t
  misc_feature (1326)..(1327): n is a, c, g, or t
  misc_feature (1332)..(1332): n is a, c, g, or t
  misc_feature (1336)..(1336): n is a, c, g, or t
  misc_feature (1340)..(1345): n is a, c, g, or t
tagagaaattactatgagaggatcgcatcaccatcaccatcacggatcctatttaggtgacactatagaatcgtcgacccacgcgtccggttatcatcaacaagaccagcagcaccagaattcagtttgctcccaggaaagcctttttgtggaaaacagtaggctcttggaagacagtaacatatgcaatgagacctataagaaaagacagctctttcggggcaacagagatggctcagggagaacatctgggagtcgacagagcagctcagaaaatgaactcaagtggtctgaccaccaaagggcctggagcagcacagactccgacagttccaaccgcaatctaaagcccgccatgaccaagacggcgagttttgggggcatcacggtgctgaccaggggtgacagcacttccagtactaggagtaccgggaagctgtccaaagcaggttccgagtcttccagcagtgcaggctcctcaggatcgctgtcccgcacccatccacctctccagagcacacccctagtctcaggtgtggcagctggctctccaggctgtgtgccttatccagagaatggaatagggggccaggttgctcccagcagcaccagctacatcctccttccacttgaagctgcaacaggcatcccgcctggaagcatccttcttaatccacacacaggccagccctttgtgaatcccgatggaactcctgcaatatacaacccacccaccagtcagcagcccctgcgaagcgccatggtggggcagtcccaacagcagccaccacagcagcagccctccccgcagccccaacagcaggtccagccaccgcagccacagatggcaggccctctggtcactcagtctgtccaggggctgcaggcttcctcccagtcagtgcaatatccagcagtctcttttcctccccnagcacctcctacctgtgtctccaacgcancacttttcccatganaanatgatgtggcaacccagtttgggcnaaatgaccctgaaccnggcagtccctcggggganaactcctgaacccccatcagggnctggtctacccnatcctccctttggcnaaanccnggnccannancccnanntttngtaatcnccttttaaaggncannannttcctaaggaggatttccaggnttgggccttccattnccananggnccncnaccccctccttnccannggaattttggnaaancnncccctggnnaaaggccggnatttntttnccnnngggnnnancccnncccnnccccaannnannggcccngggccccgntttnnaaannnnnaannannaaaangccngggnnnnnn

SEQ ID NO: 157 - DNA, 1385 bp, Homo Sapiens
  misc_feature (873)..(873): n is a, c, g, or t
  misc_feature (920)..(920): n is a, c, g, or t
  misc_feature (931)..(972): n is a, c, g, or t
  misc_feature (980)..(980): n is a, c, g, or t
  misc_feature (984)..(984): n is a, c, g, or t
  misc_feature (993)..(993): n is a, c, g, or t
  misc_feature (998)..(999): n is a, c, g, or t
  misc_feature (1001)..(1002): n is a, c, g, or t
  misc_feature (1024)..(1024): n is a, c, g, or t
  misc_feature (1031)..(1031): n is a, c, g, or t
  misc_feature (1047)..(1049): n is a, c, g, or t
  misc_feature (1052)..(1052): n is a, c, g, or t
  misc_feature (1057)..(1057): n is a, c, g, or t
  misc_feature (1071)..(1071): n is a, c, g, or t
  misc_feature (1076)..(1076): n is a, c, g, or t
  misc_feature (1082)..(1083): n is a, c, g, or t
  misc_feature (1088)..(1088): n is a, c, g, or t
  misc_feature (1094)..(1094): n is a, c, g, or t
  misc_feature (1115)..(1115): n is a, c, g, or t
  misc_feature (1117)..(1117): n is a, c, g, or t
  misc_feature (1120)..(1120): n is a, c, g, or t
  misc_feature (1131)..(1131): n is a, c, g, or t
  misc_feature (1151)..(1152): n is a, c, g, or t
  misc_feature (1192)..(1192): n is a, c, g, or t
  misc_feature (1199)..(1199): n is a, c, g, or t
  misc_feature (1205)..(1207): n is a, c, g, or t
  misc_feature (1212)..(1212): n is a, c, g, or t
  misc_feature (1215)..(1215): n is a, c, g, or t
  misc_feature (1234)..(1234): n is a, c, g, or t
  misc_feature (1240)..(1241): n is a, c, g, or t
  misc_feature (1243)..(1243): n is a, c, g, or t
  misc_feature (1247)..(1247): n is a, c, g, or t
  misc_feature (1254)..(1254): n is a, c, g, or t
  misc_feature (1257)..(1257): n is a, c, g, or t
  misc_feature (1267)..(1268): n is a, c, g, or t
  misc_feature (1270)..(1270): n is a, c, g, or t
  misc_feature (1283)..(1283): n is a, c, g, or t
  misc_feature (1289)..(1289): n is a, c, g, or t
  misc_feature (1293)..(1293): n is a, c, g, or t
  misc_feature (1296)..(1296): n is a, c, g, or t
  misc_feature (1305)..(1305): n is a, c, g, or t
  misc_feature (1309)..(1309): n is a, c, g, or t
  misc_feature (1325)..(1326): n is a, c, g, or t
  misc_feature (1328)..(1328): n is a, c, g, or t
  misc_feature (1330)..(1331): n is a, c, g, or t
  misc_feature (1339)..(1339): n is a, c, g, or t
  misc_feature (1344)..(1344): n is a, c, g, or t
  misc_feature (1350)..(1350): n is a, c, g, or t
  misc_feature (1357)..(1358): n is a, c, g, or t
  misc_feature (1368)..(1368): n is a, c, g, or t
  misc_feature (1370)..(1370): n is a, c, g, or t
  misc_feature (1372)..(1373): n is a, c, g, or t
  misc_feature (1376)..(1376): n is a, c, g, or t
  misc_feature (1381)..(1381): n is a, c, g, or t
tagagaaattactatgagaggatcgcatcaccatcaccatcacggatcctatttaggtgacactatagaatcgtcgacccacgcgtccgggaagatggctgccgcctgggggtcgtccctaacggccgcgacgcagagagcggtcactccctggccgaggggcaggctcctcacggcctccctgggaccccaggcgcgtcgggaggcgtcgtcctccagccccgaggccggcgaagggcagatccgcctcacagacagttgcgtccagaggcttttggaaatcaccgaagggtcagaattcctcaggctgcaagtggagggaggtggatgctccggattccaatacaaattttcactggatacagttatcaaccccgacgacagggtatttgaacagggtggggcaagagtggtggttgactctgatagcttggccttcgtgaaaggggcccaggtggacttcagccaagaactgatccgaagctcatttcaagtgttgaacaatcctcaagcacagcaaggctgctcctgtgggtcatctttctctatcaaactttgatgtgatgactggtgactctgggattgtcaccagttgtaccaatttgaagaacctggaattagtagaattctagaagtttacttctaatcatgtccctctcaattttatttcccgcagtccaggagtgttatgttttgccactattattttcagaatgtgaagattttactcttggcttaatttttccctccactcagtgctaaggctgagcctccagatgctgttacctcagatttaatcactggttgaaactccgtataatctgtagagcctccatggctctaaaatttggaattaacttctcttgccttaanagctgcttgtacatatgtggatagctatgtataaaagcttcattttnaagagaaaaannnnnnnnnnnnnnnnnnnnnnnnnnnnnnnnnnnnnnnnnnaaaaggcngccncccccctanagganncnnaataaacttaattacctgaaantggaacnctttttgaaaaatccnnnaangaccnccaaaacccccttntggantttttnnaaaancccggntggcccccgggggtttttttntnggngaaaaacccancctacttggggaaaattttnnggaactaggaacttaaatggaaaaaaaatccctgggaaancccccgnttaatnnncccanggncccaaaaaaaatttggggnttttcnncntttncccaggnacnaaaaaaaacnntncctggaaataccncttttnaaanccnaaaaaaaanccanttttttccgccttttnntntnntcccccgnaaaancccccnattttannaaaaaaaagnantnnttnaaatnttcc

SEQ ID NO: 158 - DNA, 780 bp, Homo Sapiens
attaactatgagaggatcgcatcaccatcaccatcacggatcctatttaggtgacactatagaatcgtcgacccacgcgtccgtgttggagagcgagcagttcctgacggagctgaccagacttttccagaagtgccggacgtcgggcagcgtctatatcaccttgaagaagtatgacggtcgaaccaaacccattccaaagaaaggtactgtggagggctttgagcccgcagacaacaagtgtctgttaagagctaccgatgggaagaagaagatcagcactgtggtgagctccaaggaagtgaataagtttcagatggcttattcaaacctccttagagctaacatggatgggttgaagaagagagacaaaaagaacaaaactaagaagaccaaagcagcagcagcagcagcagcagcagcacctgccgcagcagcaacagcagcaacaacagcagcaacaacagcagcaacagcagcacagtaaagggcatacatttcctgctttcaccaattaaccactgaattgctattttttccttttggccagatagctaggtttctggttcccccacagtaggtgttttcacataagattagggtccttttggaaagaatagttgcagtgtttataggatagttgtggtaagaatctagtttattttgcatttggctaattggtctgtgctgcatggttatatactcctggattatagattaaaagtctccgtagacatctctgtgaagagcaagctatcattaaacatgtctgtttatcga

SEQ ID NO: 159 - DNA, 1290 bp, Homo Sapiens
  misc_feature (818)..(818): n is a, c, g, or t
  misc_feature (852)..(852): n is a, c, g, or t
  misc_feature (893)..(893): n is a, c, g, or t
  misc_feature (907)..(907): n is a, c, g, or t
  misc_feature (918)..(918): n is a, c, g, or t
  misc_feature (920)..(920): n is a, c, g, or t
  misc_feature (926)..(926): n is a, c, g, or t
  misc_feature (956)..(956): n is a, c, g, or t
  misc_feature (965)..(965): n is a, c, g, or t
  misc_feature (989)..(989): n is a, c, g, or t
  misc_feature (1018)..(1018): n is a, c, g, or t
  misc_feature (1023)..(1023): n is a, c, g, or t
  misc_feature (1025)..(1025): n is a, c, g, or t
  misc_feature (1033)..(1033): n is a, c, g, or t
  misc_feature (1045)..(1045): n is a, c, g, or t
  misc_feature (1047)..(1047): n is a, c, g, or t
  misc_feature (1061)..(1061): n is a, c, g, or t
  misc_feature (1063)..(1063): n is a, c, g, or t
  misc_feature (1073)..(1073): n is a, c, g, or t
  misc_feature (1075)..(1075): n is a, c, g, or t
  misc_feature (1080)..(1080): n is a, c, g, or t
  misc_feature (1091)..(1091): n is a, c, g, or t
  misc_feature (1093)..(1093): n is a, c, g, or t
  misc_feature (1097)..(1097): n is a, c, g, or t
  misc_feature (1101)..(1103): n is a, c, g, or t
  misc_feature (1106)..(1109): n is a, c, g, or t
  misc_feature (1111)..(1113): n is a, c, g, or t
  misc_feature (1119)..(1119): n is a, c, g, or t
  misc_feature (1124)..(1124): n is a, c, g, or t
  misc_feature (1127)..(1127): n is a, c, g, or t
  misc_feature (1129)..(1129): n is a, c, g, or t
  misc_feature (1136)..(1136): n is a, c, g, or t
  misc_feature (1140)..(1140): n is a, c, g, or t
  misc_feature (1147)..(1147): n is a, c, g, or t
  misc_feature (1151)..(1152): n is a, c, g, or t
  misc_feature (1155)..(1156): n is a, c, g, or t
  misc_feature (1172)..(1172): n is a, c, g, or t
  misc_feature (1175)..(1175): n is a, c, g, or t
  misc_feature (1179)..(1179): n is a, c, g, or t
  misc_feature (1190)..(1190): n is a, c, g, or t
  misc_feature (1197)..(1200): n is a, c, g, or t
  misc_feature (1207)..(1207): n is a, c, g, or t
  misc_feature (1210)..(1210): n is a, c, g, or t
  misc_feature (1215)..(1215): n is a, c, g, or t
  misc_feature (1219)..(1220): n is a, c, g, or t
  misc_feature (1230)..(1233): n is a, c, g, or t
  misc_feature (1238)..(1239): n is a, c, g, or t
  misc_feature (1247)..(1247): n is a, c, g, or t
  misc_feature (1251)..(1252): n is a, c, g, or t
  misc_feature (1254)..(1256): n is a, c, g, or t
  misc_feature (1260)..(1260): n is a, c, g, or t
  misc_feature (1262)..(1263): n is a, c, g, or t
  misc_feature (1276)..(1278): n is a, c, g, or t
  misc_feature (1287)..(1287): n is a, c, g, or t
tagagaaattactatgagaggatcgcatcaccatcaccatcacggatcctatttaggtgacactatagaatcgtcgacccacgcgtccgcggacgcgtgggcggagccctgccgtgtgggagctggccgaggagtatctggacatcgtgcgggagcacccctgccccctgtcctacgtccgggcccacctcttcaagctgtggcaccacacgctgcaggtgcaccaggagctgcgagaggagctggccaaggtgaagaccctggagggcatcgctgctgtgagccaggagctgaagctgcggtgtcaggaggagatatccaggcaggagggagcgaagcccaccggcgacttgcccttccactggatctgccagccctacatccggccggggcccagggaggggagcaaggagaaggcaggtgcgcgcagcaagcgggccctggaggaagaggagggtggcacggaggtcctgtccaagaacaagcaaaagaagcagctgaggaacccccacaagaccttcgacccctctctgaagccaaaacatgcaaagtgtgaccagtgtggaaacccaaaggtgagtgggttccggctgcaagccaccaaggcttcagctttgggggtgggcagggtggtctctgcactgcttggggtggcaggtctggtgcccgcccagctgggtttgcaacgtggctcaaggtggcatggatgcctcaggacggccccttgcttccagccaagcccctgcccaggcctggaggggaagagagtctgggtgggttggggtgagggagaggcatctggcttgggagcagttccnagggctgcatccaggccgtgggcatctggcaaangcttcccagtggggctgctccctgctggccagcctggcccngggagtggtgctgncacaggctccnanattttntgtgcccagggcaacaaaatgtgtgttcancctgtgccncggctgctgcaaaaaaccaacctnccaaaaaaactgcaaactgcccaggttcncggantngctttttnaaaaccaaattngnaaaaattttttggncntggaaaaaangnccaanccttgaacttnangaancttnnnccnnnnannncctggnaaaancangngggtttncccnaaatttngggnnaanngccttggcctgaaagnccnaaanccccccccccnaaaattnnnnttgaacntgnaaccntctnntttaaaaaannnnttttnnccgggaantccnngnnntttntnngaaaaaaaccccnnnttccccttnccc

SEQ ID NO: 160 - DNA, 154 bp, Homo Sapiens
attacctatgagaggtcgcatcaccatcaccatcacggatcctatttaggtgacactatagaatcgtcgacccacgcgtccggccatgttgtcggtagcagcccgctcgggcccgttcgcgcccgtcctgtcggccacgtcccgcggggtggcg

SEQ ID NO: 161 - DNA, 782 bp, Homo Sapiens
  misc_feature (25)..(25): n is a, c, g, or t
  misc_feature (27)..(27): n is a, c, g, or t
  misc_feature (31)..(31): n is a, c, g, or t
  misc_feature (34)..(34): n is a, c, g, or t
  misc_feature (42)..(42): n is a, c, g, or t
  misc_feature (48)..(48): n is a, c, g, or t
  misc_feature (53)..(53): n is a, c, g, or t
  misc_feature (57)..(57): n is a, c, g, or t
  misc_feature (70)..(70): n is a, c, g, or t
  misc_feature (105)..(105): n is a, c, g, or t
  misc_feature (113)..(114): n is a, c, g, or t
  misc_feature (118)..(118): n is a, c, g, or t
  misc_feature (129)..(129): n is a, c, g, or t
  misc_feature (151)..(151): n is a, c, g, or t
  misc_feature (169)..(169): n is a, c, g, or t
  misc_feature (174)..(174): n is a, c, g, or t
  misc_feature (184)..(184): n is a, c, g, or t
  misc_feature (190)..(190): n is a, c, g, or t
  misc_feature (219)..(219): n is a, c, g, or t
  misc_feature (251)..(251): n is a, c, g, or t
  misc_feature (275)..(275): n is a, c, g, or t
  misc_feature (287)..(287): n is a, c, g, or t
  misc_feature (302)..(302): n is a, c, g, or t
  misc_feature (323)..(323): n is a, c, g, or t
  misc_feature (371)..(371): n is a, c, g, or t
  misc_feature (423)..(423): n is a, c, g, or t
  misc_feature (470)..(470): n is a, c, g, or t
  misc_feature (488)..(488): n is a, c, g, or t
  misc_feature (515)..(515): n is a, c, g, or t
  misc_feature (530)..(530): n is a, c, g, or t
  misc_feature (605)..(605): n is a, c, g, or t
  misc_feature (643)..(644): n is a, c, g, or t
  misc_feature (711)..(711): n is a, c, g, or t
  misc_feature (728)..(728): n is a, c, g, or t
  misc_feature (763)..(763): n is a, c, g, or t
  misc_feature (780)..(780): n is a, c, g, or t
tagagagaatttctatgagaggatngnctcnccntcaccatnacgggnttctntttnggtgacactatanaatcgtcgacccacgcgtccgcggcacgcgtggancagccccnnacanggaccccgcangagatgggtgcccccatccgcncactgtcctttggcaacnggacntcatgcctcncaaganggatgttcccgtgaagaaaccagcagggncctccatctccaaacctgctgctaaaccagcngcagcaggggctcctccagccaanaccaaagctganccagctgtcccccangcccctcagaaaacccaggancctccagtcgatctctccaaagtggtgatcgagtttaacaaggaccanctggaggagttcaaggaggccttcgagctgtttgaccgagtgggggatggcnagatcctgtacagccagtgtggggacgtgatgagggccctgggccanaaccccaccaacgccgangtgctcaaggtcctggggaaccccaanagtgatgagctgaantcgcggcgtgtggactttgatactttcctgcccatgctccaggcagtggccaagaaccgaggccaaggagagaanatgactgatgaggaggtggagaccgttctggcaggacnngaggacagcaacggctgcatcaactacgaggccttcttgaaacacatcctaagcgtctgagtgctgnagatccagtgggttccngacactgggcccccgcatgcgatagcacgttccanccaccaaggaggccacnta

SEQ ID NO: 162 - DNA, 1354 bp, Homo Sapiens
  misc_feature (1)..(1): n is a, c, g, or t
  misc_feature (5)..(5): n is a, c, g, or t
  misc_feature (894)..(894): n is a, c, g, or t
  misc_feature (897)..(897): n is a, c, g, or t
  misc_feature (900)..(900): n is a, c, g, or t
  misc_feature (936)..(936): n is a, c, g, or t
  misc_feature (947)..(947): n is a, c, g, or t
  misc_feature (950)..(950): n is a, c, g, or t
  misc_feature (955)..(955): n is a, c, g, or t
  misc_feature (957)..(957): n is a, c, g, or t
  misc_feature (966)..(966): n is a, c, g, or t
  misc_feature (968)..(968): n is a, c, g, or t
  misc_feature (973)..(973): n is a, c, g, or t
  misc_feature (992)..(992): n is a, c, g, or t
  misc_feature (1004)..(1005): n is a, c, g, or t
  misc_feature (1012)..(1012): n is a, c, g, or t
  misc_feature (1020)..(1020): n is a, c, g, or t
  misc_feature (1037)..(1037): n is a, c, g, or t
  misc_feature (1040)..(1040): n is a, c, g, or t
  misc_feature (1050)..(1051): n is a, c, g, or t
  misc_feature (1059)..(1060): n is a, c, g, or t
  misc_feature (1064)..(1064): n is a, c, g, or t
  misc_feature (1077)..(1077): n is a, c, g, or t
  misc_feature (1083)..(1084): n is a, c, g, or t
  misc_feature (1092)..(1092): n is a, c, g, or t
  misc_feature (1095)..(1095): n is a, c, g, or t
  misc_feature (1097)..(1097): n is a, c, g, or t
  misc_feature (1105)..(1105): n is a, c, g, or t
  misc_feature (1112)..(1113): n is a, c, g, or t
  misc_feature (1115)..(1115): n is a, c, g, or t
  misc_feature (1119)..(1119): n is a, c, g, or t
  misc_feature (1124)..(1124): n is a, c, g, or t
  misc_feature (1133)..(1133): n is a, c, g, or t
  misc_feature (1138)..(1138): n is a, c, g, or t
  misc_feature (1149)..(1149): n is a, c, g, or t
  misc_feature (1155)..(1156): n is a, c, g, or t
  misc_feature (1160)..(1160): n is a, c, g, or t
  misc_feature (1165)..(1166): n is a, c, g, or t
  misc_feature (1183)..(1183): n is a, c, g, or t
  misc_feature (1185)..(1186): n is a, c, g, or t
  misc_feature (1189)..(1189): n is a, c, g, or t
  misc_feature (1192)..(1192): n is a, c, g, or t
  misc_feature (1199)..(1199): n is a, c, g, or t
  misc_feature (1203)..(1203): n is a, c, g, or t
  misc_feature (1209)..(1209): n is a, c, g, or t
  misc_feature (1213)..(1214): n is a, c, g, or t
  misc_feature (1220)..(1220): n is a, c, g, or t
  misc_feature (1222)..(1222): n is a, c, g, or t
  misc_feature (1226)..(1227): n is a, c, g, or t
  misc_feature (1230)..(1232): n is a, c, g, or t
  misc_feature (1235)..(1237): n is a, c, g, or t
  misc_feature (1241)..(1241): n is a, c, g, or t
  misc_feature (1244)..(1244): n is a, c, g, or t
  misc_feature (1246)..(1246): n is a, c, g, or t
  misc_feature (1249)..(1249): n is a, c, g, or t
  misc_feature (1254)..(1254): n is a, c, g, or t
  misc_feature (1257)..(1265): n is a, c, g, or t
  misc_feature (1269)..(1269): n is a, c, g, or t
  misc_feature (1271)..(1273): n is a, c, g, or t
  misc_feature (1275)..(1275): n is a, c, g, or t
  misc_feature (1278)..(1280): n is a, c, g, or t
  misc_feature (1282)..(1284): n is a, c, g, or t
  misc_feature (1286)..(1288): n is a, c, g, or t
  misc_feature (1290)..(1301): n is a, c, g, or t
  misc_feature (1303)..(1303): n is a, c, g, or t
  misc_feature (1305)..(1321): n is a, c, g, or t
  misc_feature (1324)..(1324): n is a, c, g, or t
  misc_feature (1334)..(1339): n is a, c, g, or t
  misc_feature (1341)..(1342): n is a, c, g, or t
  misc_feature (1344)..(1344): n is a, c, g, or t
  misc_feature (1347)..(1347): n is a, c, g, or t
  misc_feature (1352)..(1354): n is a, c, g, or t
naatngagaaattactatgagaggatcgcatcaccatcaccatcacggatcctatttaggtgacactatagaatcgtcgacccacgcgtccgggccttcgggcagagctcggcgctgctgcagcaccagcgcacacacacggccgagcgcccctaccgctgcccccactgcggcaaagccttcgggcagagctccaacttgcaacaccacctgcgcatccacacgggcgagcggccctacgcctgcccgcactgctccaaggccttcggccagagctcagcgctgctccagcacctgcacgtgcattcgggcgagcgtccctatcgctgtcagctctgcgggaaggccttcggccaggcctccagcctcaccaagcacaaacgggtgcatgagggtgcagccgctgctgcagctgccgcggccgctccctatagtgagtcgtattaagcttaattagctgagcttggactcctgttgatagatccagtaatgacctcagaactccatctggatttgttcagaacgctcggttgccgccgggcgttttttattggtgagaatccaagctagcttggcgagattttcaggagctaaggaagctaaaatggagaaaaaaatcactggatataccaccgttgatatatcccaatggcatcgtaaagaacattttgaggcatttcagtcagttgctcaatgtacctataaccagaccgttcagctggatattacggcctttttaaagaccgtaaagaaaaataagcacaagttttatccggcctttattcacattcttgcccgcctgatgaatgctcatccgggaaatttcgtatggcaatgaaaaaacggtgagctggtgatatgggatagtgttcaccccttgttacaccgtttttncangancaaactgaaacgtttttcatcgctctggaagtgaanaccacgacaanttncgggnanttttctaananataanattccccaaaaatgtgggnggggttaacggnnaaaaacntggccctnattttcccttaaagggnttnattgaaaaanntgtttttnngtcncaacccaaattcnttgggnnaaatttcnccnantttttaanttaaaanngnggcnaaaangggaaaaanttttnttccccccccntttttnnccanggggnnaaaattttaaacccaangnnaanaangggcctnaaancccccntggnnaatttnangttnnatnnnggnnntttnggnanggntttcncannnnnnnnnaaanannntntannnannntnnnannnnnnnnnnnnanannnnnnnnnnnnnnnnnaantttttttaannnnnntnntntgngcccnnn

SEQ ID NO: 163 - DNA, 379 bp, Homo Sapiens
ggaccaaagggggtgctgggttcccagggagcagggatgtttaattactatgtcatgtgcaatgttgttttaggccaacccttgccccaagcccagtctcttctccctccccaccatgtccagacctcccaaatggttcttgtgcatctgttggagaagtcaagggagtagggagaagggccccaaggatgggcccaggttaggtgaagagtaagatgtgagctgaactcctcgaactgaagagacccacacttggtcacattctctcacgctgccttcaggatccccagcccccaactcttcttcctgaggatggaaatccactccagccccactaggactgatgtgggtgccatacaggcaggagcagcccaccagg

SEQ ID NO: 164 - DNA, 1025 bp, Homo Sapiens
aattaactatgagaggatcgcatcaccatcaccatcacggatcctatttaggtgacactatagaatcgtcgacccacgcgtccgcgatggagcgtcttgtcgcccgtgggaccttcccagtactagtgcgcaccagcgcctgccgcagcctcttcgggccggtggaccacgaggagctgagccgcgagctgcaggcccgcctggccgagctgaacgccgaggaccagaaccgctgggattacgacttccagcaggacatgccgctgcggggccctggacgcctgcagtggaccgaagtggacagcgactcggtgcccgcgttctaccgcgagacggtgcaggtggggcgctgccgcctgctgctggcgccgcggcccgtcgcggtcgcggtggctgtcagcccgcccctcgagccggccgctgagtccctcgacggcctcgaggaggcgccggagcagctgcctagtgtcccggtcccggccccggcgtccaccccgcccccagtcccggtcctggctccagccccggccccggctccggctccggtcgcggctccggtcgcggctccggtcgcggtcgcggtcctggccccggccccggccccggccccggctccggctccggccccggctccagtcgcggccccggccccagccccggccccggccccggccccggcccccgccccggccccggccccggacgcggcgcctcaagagagcgccgagcagggcgcgaaccaggggcagcgcggccaggagcctctcgctgaccagctgcactcggggatttcgggacgtcccgcggccggcaccgcggccgctccctatagtgagtcgtattaagcttaattagctgagcttggactcctgttgatagatccagtaatgacctcagaactccatctggatttgttcagaacgctcgggttgccgccgggcgttttttattggtgagaatccaagctagcttggcgagattttcaggagctaaggaagctaaaatggagaaaaaaatcactggat

SEQ ID NO: 165 - DNA, 1380 bp, Homo Sapiens
  misc_feature (2)..(2): n is a, c, g, or t
  misc_feature (801)..(801): n is a, c, g, or t
  misc_feature (807)..(807): n is a, c, g, or t
  misc_feature (818)..(818): n is a, c, g, or t
  misc_feature (826)..(826): n is a, c, g, or t
  misc_feature (851)..(852): n is a, c, g, or t
  misc_feature (868)..(868): n is a, c, g, or t
  misc_feature (872)..(872): n is a, c, g, or t
  misc_feature (886)..(886): n is a, c, g, or t
  misc_feature (896)..(896): n is a, c, g, or t
  misc_feature (899)..(899): n is a, c, g, or t
  misc_feature (903)..(903): n is a, c, g, or t
  misc_feature (905)..(905): n is a, c, g, or t
  misc_feature (923)..(923): n is a, c, g, or t
  misc_feature (927)..(927): n is a, c, g, or t
  misc_feature (938)..(939): n is a, c, g, or t
  misc_feature (954)..(954): n is a, c, g, or t
  misc_feature (968)..(968): n is a, c, g, or t
  misc_feature (974)..(974): n is a, c, g, or t
  misc_feature (978)..(978): n is a, c, g, or t
  misc_feature (982)..(984): n is a, c, g, or t
  misc_feature (986)..(986): n is a, c, g, or t
  misc_feature (991)..(992): n is a, c, g, or t
  misc_feature (995)..(995): n is a, c, g, or t
  misc_feature (1001)..(1001): n is a, c, g, or t
  misc_feature (1006)..(1006): n is a, c, g, or t
  misc_feature (1017)..(1017): n is a, c, g, or t
  misc_feature (1026)..(1026): n is a, c, g, or t
  misc_feature (1034)..(1034): n is a, c, g, or t
  misc_feature (1036)..(1036): n is a, c, g, or t
  misc_feature (1044)..(1044): n is a, c, g, or t
  misc_feature (1047)..(1048): n is a, c, g, or t
  misc_feature (1058)..(1058): n is a, c, g, or t
  misc_feature (1067)..(1067): n is a, c, g, or t
  misc_feature (1070)..(1070): n is a, c, g, or t
  misc_feature (1073)..(1073): n is a, c, g, or t
  misc_feature (1077)..(1077): n is a, c, g, or t
  misc_feature (1079)..(1080): n is a, c, g, or t
  misc_feature (1083)..(1083): n is a, c, g, or t
  misc_feature (1091)..(1091): n is a, c, g, or t
  misc_feature (1093)..(1093): n is a, c, g, or t
  misc_feature (1110)..(1110): n is a, c, g, or t
  misc_feature (1113)..(1113): n is a, c, g, or t
  misc_feature (1116)..(1116): n is a, c, g, or t
  misc_feature (1129)..(1129): n is a, c, g, or t
  misc_feature (1132)..(1136): n is a, c, g, or t
  misc_feature (1142)..(1142): n is a, c, g, or t
  misc_feature (1145)..(1146): n is a, c, g, or t
  misc_feature (1148)..(1148): n is a, c, g, or t
  misc_feature (1150)..(1151): n is a, c, g, or t
  misc_feature (1153)..(1154): n is a, c, g, or t
  misc_feature (1175)..(1175): n is a, c, g, or t
  misc_feature (1179)..(1180): n is a, c, g, or t
  misc_feature (1182)..(1182): n is a, c, g, or t
  misc_feature (1184)..(1184): n is a, c, g, or t
  misc_feature (1186)..(1186): n is a, c, g, or t
  misc_feature (1189)..(1191): n is a, c, g, or t
  misc_feature (1194)..(1195): n is a, c, g, or t
  misc_feature (1198)..(1198): n is a, c, g, or t
  misc_feature (1200)..(1202): n is a, c, g, or t
  misc_feature (1210)..(1210): n is a, c, g, or t
  misc_feature (1215)..(1215): n is a, c, g, or t
  misc_feature (1217)..(1217): n is a, c, g, or t
  misc_feature (1221)..(1222): n is a, c, g, or t
  misc_feature (1225)..(1225): n is a, c, g, or t
  misc_feature (1227)..(1227): n is a, c, g, or t
  misc_feature (1231)..(1232): n is a, c, g, or t
  misc_feature (1252)..(1252): n is a, c, g, or t
  misc_feature (1257)..(1257): n is a, c, g, or t
  misc_feature (1264)..(1264): n is a, c, g, or t
  misc_feature (1267)..(1270): n is a, c, g, or t
  misc_feature (1272)..(1273): n is a, c, g, or t
  misc_feature (1276)..(1278): n is a, c, g, or t
  misc_feature (1280)..(1288): n is a, c, g, or t
  misc_feature (1291)..(1296): n is a, c, g, or t
  misc_feature (1299)..(1301): n is a, c, g, or t
  misc_feature (1304)..(1313): n is a, c, g, or t
  misc_feature (1315)..(1315): n is a, c, g, or t
  misc_feature (1329)..(1330): n is a, c, g, or t
  misc_feature (1333)..(1333): n is a, c, g, or t
  misc_feature (1336)..(1339): n is a, c, g, or t
  misc_feature (1341)..(1342): n is a, c, g, or t
  misc_feature (1344)..(1348): n is a, c, g, or t
  misc_feature (1353)..(1355): n is a, c, g, or t
  misc_feature (1357)..(1357): n is a, c, g, or t
  misc_feature (1359)..(1360): n is a, c, g, or t
  misc_feature (1367)..(1367): n is a, c, g, or t
  misc_feature (1370)..(1370): n is a, c, g, or t
  misc_feature (1373)..(1373): n is a, c, g, or t
  misc_feature (1375)..(1375): n is a, c, g, or t
  misc_feature (1377)..(1377): n is a, c, g, or t
cnaatagagagaattactatgagaggatcgcatcaccatcaccatcacggatcctatttaggtgacactatagaatcgtcgacccacgcgtccggctacttcttcttggacgacacggaccctgatagcatgaaggattttgagatcgtggaccagccgggcttggacatctttggacaggttttcaaccagtggaagagcaaggagtgtgtttgccccaattgcagtcgcagcattgccgcctcccgctttgctccccatctggagaagtgcctgggaatgggtcggaacagcagccgaatcgccaaccgccggattgccaatagcaacaatatgaataagtctgagagtgaccaagaagataatgatgacatcaatgacaacgactggtcctatggctcggagaagaaagccaagaagagaaagtcagacaagaaccccaattcccctcgaagatccaagtcattaaaacacaaaaatggggaacttagcaattcggatccttttaagtataacaattcaactgggatcagctatgagaccctggggccggaggagcttcgcagcctgctaaccacgcaatgtggggtgatttctgaacacaccaagaagatgtgcacaaggtccctgcgctgcccacagcacacagatgagcagaggcgaaccgtacggatttattttctcgggccctcggctgtccttccagaagtcgagagctccctggataatgacagctttgacatgactgacagccaggccctgatcagccggcttcagtgggacggctcctctgacctctcnccctcngaatcaggctncctccaanacgagtgaaaatcagggatggggtnnagggtacccacagctntgantcccggaaaccaanaaaaaaaatnccntctnancctggtagggaatgcccnccgnctaagtttcannaaaaaaaaaaaaccnaaagcccccggggncccccnaaancccnnnanttttnnatnaaatcnccttnacttgggggcnaagggaaancctttggntnaaaaaaanccnntttccctganccccccccnggnggnaaancnnggnaaaagaancncttctgggggtttgggnctnggnaaacttggggggnccnnnnngcaaanaanncnanntnncccccccgggggggggaaaancccnncnangngannnaannccncnnngggggaanccaancngaannttntnctgnnaaaaaattgggggggggggnttttnttttttntgnnnntnngannncnnnnnnnnnggnnnnnntgnnnttnnnnnnnnnncncccccccccaaaannaanccnnnngnnannnnnccccnnngngnntaaaaanaanggncncnccc

SEQ ID NO: 166 - DNA, 1334 bp, Homo Sapiens
  misc_feature (812)..(812): n is a, c, g, or t
  misc_feature (816)..(816): n is a, c, g, or t
  misc_feature (847)..(847): n is a, c, g, or t
  misc_feature (862)..(862): n is a, c, g, or t
  misc_feature (878)..(879): n is a, c, g, or t
  misc_feature (887)..(887): n is a, c, g, or t
  misc_feature (907)..(907): n is a, c, g, or t
  misc_feature (923)..(923): n is a, c, g, or t
  misc_feature (931)..(931): n is a, c, g, or t
  misc_feature (933)..(933): n is a, c, g, or t
  misc_feature (938)..(938): n is a, c, g, or t
  misc_feature (944)..(944): n is a, c, g, or t
  misc_feature (955)..(955): n is a, c, g, or t
  misc_feature (957)..(957): n is a, c, g, or t
  misc_feature (966)..(967): n is a, c, g, or t
  misc_feature (970)..(970): n is a, c, g, or t
  misc_feature (972)..(972): n is a, c, g, or t
  misc_feature (984)..(984): n is a, c, g, or t
  misc_feature (993)..(993): n is a, c, g, or t
  misc_feature (996)..(996): n is a, c, g, or t
  misc_feature (1008)..(1009): n is a, c, g, or t
  misc_feature (1034)..(1035): n is a, c, g, or t
  misc_feature (1058)..(1058): n is a, c, g, or t
  misc_feature (1061)..(1061): n is a, c, g, or t
  misc_feature (1063)..(1063): n is a, c, g, or t
  misc_feature (1088)..(1088): n is a, c, g, or t
  misc_feature (1097)..(1097): n is a, c, g, or t
  misc_feature (1106)..(1106): n is a, c, g, or t
  misc_feature (1113)..(1113): n is a, c, g, or t
  misc_feature (1118)..(1118): n is a, c, g, or t
  misc_feature (1121)..(1121): n is a, c, g, or t
  misc_feature (1129)..(1131): n is a, c, g, or t
  misc_feature (1133)..(1136): n is a, c, g, or t
  misc_feature (1138)..(1138): n is a, c, g, or t
  misc_feature (1140)..(1140): n is a, c, g, or t
  misc_feature (1142)..(1155): n is a, c, g, or t
  misc_feature (1157)..(1159): n is a, c, g, or t
  misc_feature (1161)..(1177): n is a, c, g, or t
  misc_feature (1185)..(1186): n is a, c, g, or t
  misc_feature (1197)..(1198): n is a, c, g, or t
  misc_feature (1204)..(1204): n is a, c, g, or t
  misc_feature (1209)..(1209): n is a, c, g, or t
  misc_feature (1217)..(1217): n is a, c, g, or t
  misc_feature (1221)..(1223): n is a, c, g, or t
  misc_feature (1225)..(1225): n is a, c, g, or t
  misc_feature (1228)..(1229): n is a, c, g, or t
  misc_feature (1231)..(1233): n is a, c, g, or t
  misc_feature (1235)..(1235): n is a, c, g, or t
  misc_feature (1243)..(1243): n is a, c, g, or t
  misc_feature (1253)..(1253): n is a, c, g, or t
  misc_feature (1268)..(1268): n is a, c, g, or t
  misc_feature (1273)..(1273): n is a, c, g, or t
  misc_feature (1278)..(1278): n is a, c, g, or t
  misc_feature (1290)..(1290): n is a, c, g, or t
  misc_feature (1293)..(1294): n is a, c, g, or t
  misc_feature (1296)..(1296): n is a, c, g, or t
  misc_feature (1303)..(1303): n is a, c, g, or t
  misc_feature (1307)..(1307): n is a, c, g, or t
  misc_feature (1317)..(1317): n is a, c, g, or t
gattagagagaattactatgagaggatcgcatcaccatcaccatcacggatcctatttaggtgacactatagaatcgtcgacccacgcgtccggggttcacggtgttgcccttcccgggttggaaagagccaagggttggagcttcgatgggaaacgagagggcccaggcccagaccaggagggcagcacccaggcctggcagaaacggcgctcttcagacgacgcagggcctggatcctggaagcccccaccaccgccccaaagcaccaaaccaagcttcagcgccatgcgcagagcagaggccacatggcacatagctgaagagagtgcccccaaccacagctgccagagtcccagcccagcctcccaagatggggaagaggagaaggaggggaccctcttcccagagaggacacttccagctaggaatgccaagctacaggaccccgctctagctccatggcctcccaagccagtggctgtgcccaggggccgccagcctccccaggagccaggggtcagggaggaggctgaggctggagatgcagctccaggagtcaacaaaccccggctgaggctgagctcacagcaagaccaagaggagcccgaagtccaagggccccctgatccaggccggcggactgcccccctgaagcccaagaggacacggcgggcacagtcctgtgacaagctggaacctgatagaagacggcctcctgaccccacaggaaccagtgagccaggaacagactgacaactgccacaacaccctcctcagcccctcgacatgtgcctcgcaaaggactcaaancccntatccaccccccagttccccagggccccccntgccaagcccctgtncttacaggggggcaannacgggcangaaccaggcatggggggaancttggaggccaggganctaaaaananaaggnaccccnccttggaaaanancgaaggctnntcnantgcctgccttcnaataccttntcntttgaaaaaagnntttttggggtgggggcttttttttnntccccccaaaaagggtggatttnttntncctttttttcccaaggaattttttnccccttttnttttaaaanaaaaaanccaanttncttaaaannnannnnananannnnnnnnnnnnnnannnannnnnnnnnnnnnnnnnaggggggnncccccccctanngggggnccaantaaacttnattnnntnaanntnnncncccggttnaaaaattccnaaaaagcccccaaanccccntgganttttttaaaaanttnntnttccccngggntttttttttnttgaaaactaccctttt

SEQ ID NO: 167 - DNA, 731 bp, Homo Sapiens
cgcatcaccatcaccatcacggatcctatttaggtgacactatagaatcgtcgacccacgcgtccggtgtcatggaggcctacgagcaggtccaaaagggacccctgaagctgaaaggcgtcgcagagctgggagtgaccaagcggaagaagaaaaagaaggacaaagacaaagcgaaactcctggaagcaatgggaacgagcaaaaagaacgaggaggagaagcggcgcggcctggacaagcggaccccggcccaggcggccttcgagaaaatgcaggagaagcggcaaatggaaaggatcctaaagaaggcatccaaaacccacaagcagagagtggaggacttcaacagacacctggacacactcacggagcattacgacattcccaaagtcagctggacgaagtagccgcctgcccccagtatggagcagcatcgagggttcgcaaaaggccacactggggttgtgtgtgtttcctttggtatattctggaaacatggctacacacacccttgcatcttctgctacagactgcttttcgaagctgtgtaccctcattctggaacttgattaaagtaagatcgtccttgtactcagtttaggcttcttggcaacatacagaagatacacccttttcgtttggatggaaaagtttctaagttttatccagaggtaaagcccattgtgtgtctgtgtcatgtaaaaatgttttcacccgagtttgcatgt

SEQ ID NO: 168 - DNA, 1393 bp, Homo Sapiens
  misc_feature (826)..(826): n is a, c, g, or t
  misc_feature (903)..(903): n is a, c, g, or t
  misc_feature (908)..(908): n is a, c, g, or t
  misc_feature (919)..(919): n is a, c, g, or t
  misc_feature (928)..(928): n is a, c, g, or t
  misc_feature (946)..(946): n is a, c, g, or t
  misc_feature (989)..(989): n is a, c, g, or t
  misc_feature (1031)..(1031): n is a, c, g, or t
  misc_feature (1040)..(1040): n is a, c, g, or t
  misc_feature (1063)..(1063): n is a, c, g, or t
  misc_feature (1066)..(1066): n is a, c, g, or t
  misc_feature (1075)..(1075): n is a, c, g, or t
  misc_feature (1078)..(1078): n is a, c, g, or t
  misc_feature (1081)..(1081): n is a, c, g, or t
  misc_feature (1086)..(1086): n is a, c, g, or t
  misc_feature (1102)..(1103): n is a, c, g, or t
  misc_feature (1122)..(1122): n is a, c, g, or t
  misc_feature (1124)..(1124): n is a, c, g, or t
  misc_feature (1127)..(1128): n is a, c, g, or t
  misc_feature (1140)..(1140): n is a, c, g, or t
  misc_feature (1147)..(1147): n is a, c, g, or t
  misc_feature (1150)..(1150): n is a, c, g, or t
  misc_feature (1156)..(1156): n is a, c, g, or t
  misc_feature (1158)..(1158): n is a, c, g, or t
  misc_feature (1165)..(1165): n is a, c, g, or t
  misc_feature (1179)..(1179): n is a, c, g, or t
  misc_feature (1182)..(1182): n is a, c, g, or t
  misc_feature (1186)..(1186): n is a, c, g, or t
  misc_feature (1194)..(1194): n is a, c, g, or t
  misc_feature (1203)..(1203): n is a, c, g, or t
  misc_feature (1216)..(1216): n is a, c, g, or t
  misc_feature (1218)..(1218): n is a, c, g, or t
  misc_feature (1221)..(1222): n is a, c, g, or t
  misc_feature (1245)..(1246): n is a, c, g, or t
  misc_feature (1248)..(1251): n is a, c, g, or t
  misc_feature (1254)..(1256): n is a, c, g, or t
  misc_feature (1258)..(1258): n is a, c, g, or t
  misc_feature (1261)..(1261): n is a, c, g, or t
  misc_feature (1263)..(1265): n is a, c, g, or t
  misc_feature (1269)..(1269): n is a, c, g, or t
  misc_feature (1273)..(1275): n is a, c, g, or t
  misc_feature (1279)..(1280): n is a, c, g, or t
  misc_feature (1292)..(1294): n is a, c, g, or t
  misc_feature (1298)..(1304): n is a, c, g, or t
  misc_feature (1308)..(1312): n is a, c, g, or t
  misc_feature (1316)..(1316): n is a, c, g, or t
  misc_feature (1325)..(1328): n is a, c, g, or t
  misc_feature (1336)..(1337): n is a, c, g, or t
  misc_feature (1341)..(1344): n is a, c, g, or t
  misc_feature (1347)..(1348): n is a, c, g, or t
  misc_feature (1354)..(1358): n is a, c, g, or t
  misc_feature (1362)..(1364): n is a, c, g, or t
  misc_feature (1367)..(1369): n is a, c, g, or t
  misc_feature (1371)..(1372): n is a, c, g, or t
  misc_feature (1375)..(1375): n is a, c, g, or t
  misc_feature (1381)..(1383): n is a, c, g, or t
  misc_feature (1386)..(1388): n is a, c, g, or t
  misc_feature (1391)..(1391): n is a, c, g, or t
  misc_feature (1393)..(1393): n is a, c, g, or t
tagagaaattactatgagaggatcgcatcaccatcaccatcacggatcctatttaggtgacactatagaatcgtcgacccacgcgtccgggaaacgggaactgggcttgggacaagagccatcccaagtccaaggccaagtaggctcgggagaacagggcaacatttcctaccacaggccaaggagacaaaagagatattggaaggaggggaaagagaagcccagacaaacagcagatgagttgagtggggcagagggacagggcagccagaccaaggccaagccttctcacccttggccagctggaagggacttcagcaaccaagaccacctggcaacaggctcagtgggggtcaggtccaggtccccgaagaggtgctggagaggaaagcagggagccactgcatccagcacatggggtgcctgggcctcagatggggaccccaaagaagcagaagctgaagaaggtacggctgggggttctgtcctgctcatccaaccacccctaaatacccaccctgtggactttgagctgaacatgcccactggcccccaggccacatgggacctggaggagcctacctggggcctgcccctgccagcaggtgccagggctggtgaggaagagctggggggcagaggtaaagccctgcaggggaggccacagggtccatcccgtcttcaggatcatctacactgcactaggggagccccaggaaggcagcaccctggaggccctgtgccagtgaggacaggagaccctaaggccccgggagcccagtgccagccagaggttgtgcaggcaaggagaccaaagattgatganaagacccccagcaggggtactgggtacccggcaggccagtgccctcacagttgacttggaccagggtggctgtgaanggaantctttgttgcnaaggaggangaggaaaagggaggactnggtagggtttgtttcttctgcttgtttctgtacagggcccccnaactcctggaaaaatcaagcaaggaaaacctggggcttgccntggccaaancaactcacaaatgccaatgccanttncaaggccanccnaancctgnccccttggggaatccnncctggaggcttcccctaancnccnnccttggcttggnggaagcnctnaaaaantntttcccnaattcccccccctnaantggnaaaaaaangggaaaaanccctttcaggggncnaanncctggttccccaaagggtccccnntnnnnttnnngnaangnnncccntttnnnaaannttccccccttgnnncccnnnnnnncccnnnnnaaanccccccccnnnntttttttnnaaannnnttnncccccnnnnncccnnnccnnnannttntttttnnnccnnntcntn

SEQ ID NO: 169 - DNA, 1196 bp, Homo Sapiens
  misc_feature (9)..(9): n is a, c, g, or t
  misc_feature (937)..(937): n is a, c, g, or t
  misc_feature (942)..(942): n is a, c, g, or t
  misc_feature (989)..(989): n is a, c, g, or t
  misc_feature (997)..(997): n is a, c, g, or t
  misc_feature (1015)..(1015): n is a, c, g, or t
  misc_feature (1032)..(1032): n is a, c, g, or t
  misc_feature (1047)..(1047): n is a, c, g, or t
  misc_feature (1050)..(1050): n is a, c, g, or t
  misc_feature (1055)..(1055): n is a, c, g, or t
  misc_feature (1064)..(1064): n is a, c, g, or t
  misc_feature (1070)..(1070): n is a, c, g, or t
  misc_feature (1073)..(1073): n is a, c, g, or t
  misc_feature (1076)..(1077): n is a, c, g, or t
  misc_feature (1081)..(1083): n is a, c, g, or t
  misc_feature (1096)..(1096): n is a, c, g, or t
  misc_feature (1100)..(1101): n is a, c, g, or t
  misc_feature (1127)..(1127): n is a, c, g, or t
  misc_feature (1131)..(1132): n is a, c, g, or t
  misc_feature (1140)..(1140): n is a, c, g, or t
  misc_feature (1148)..(1148): n is a, c, g, or t
  misc_feature (1152)..(1152): n is a, c, g, or t
  misc_feature (1157)..(1157): n is a, c, g, or t
  misc_feature (1159)..(1159): n is a, c, g, or t
  misc_feature (1171)..(1171): n is a, c, g, or t
  misc_feature (1183)..(1183): n is a, c, g, or t
  misc_feature (1192)..(1192): n is a, c, g, or t
attagaggnaattactatgagaggatcgcatcaccatcaccatcacggatcctatttaggtgacactatagaatcgtcgacccacgcgtccggtcagcagaaaatcaaggaactggagttggaagtacttaaacacactcagagcattaaatcacagaacaacctacaggaaaagctggttcaggagaaatctaaagttgctgatgcagaggaaaagattttggacctgcagcggaaattagaacatgctcataaagtctgtctcacagacacttgtatttcagagaagcagcagctagaggaaaagataaaagaagcaacacaaaatgaagctaaagtaaagcaacaatatcaagaagaacaacagaagaggaaacttctatatcagaacgtagatgagttacacaggcaagtgagaaccttacaagataaagaaaatctactggaaatgacctgttctcagcaacaatccagaattcagcaacaagaggccctacttaaacaactggaaaatgaaaaaagaaaatatgatgagtctcgggtatttctttatagcagtgcaagaacagcttgacacagaaaattggtaccaagaagcggagcgttactaaaaaagatacctgaaaatgtggaagcaactttggaactgggtaacaggcagagattggaagagtttggagggctcagaagaaggcaggaggaccaggagcagtggctcacaactgtaatcccagcgcttgagaggctgaggtaggaggattgcttgaggccaggagttcaagaccagcctgggaaacatagtgagcccttgtctcaacaaaaaaataattagccagatatggtggcatggacctgtagtaccagctactcaggaggctgaggtgggaagatcacttgagctgggaggtcggggttgcaatgagccatgatcatgccnctacnctacagcctaggtgacccagcgagactctgtctcaaaaaaaaaaaangaggatgnaagtttgtaacttcttanagactggttaattgttntgacccaaatactgntanaaatntggacgggnaggccnccntanngggnnnccaatggaaatanggannttttgggaactggaaaaacgtccccnggtnncccctacnaaaactcncgcnttggntncttgtcccaggnttggggaatttnatttaaaanggtt

SEQ ID NO: 170 - DNA, 956 bp, Homo Sapiens
atgcagctcaagccgatggagatcaaccccgagatgctgaacaaagtgctgtcccggctgggggtcgccggccagtggcgcttcgtggacgtgctggggctggaagaggagtctctgggctcggtgccagcgcctgcctgcgcgctgctgctgctgtttcccctcacggcccagcatgagaacttcaggaaaaagcagattgaagagctgaagggacaagaagttagtcctaaagtgtacttcatgaagcagaccattgggaattcctgtggcacaatcggacttattcacgcagtggccaataatcaagacaaactgggatttgaggatggatcagttctgaaacagtttctttctgaaacagagaaaatgtcccctgaagacagagcaaaatgctttgaaaagaatgaggccatacaggcagcccatgatgccgtggcacaggaaggccaatgtcgggtagatgacaaggtgaatttccattttattctgtttaacaacgtggatggccacctctatgaacttgatggacgaatgccttttccggtgaaccatggcgccagttcagaggacaccctgctgaaggacgctgccaaggtctgcagagaattcaccgagcgtgagcaaggagaagtccgcttctctgccgtggctctctgcaaggcagcctaagcggccgctccctatagtgagtcgtattaagcttaattagctgagcttggactcctgttgatagatccagtaatgacctcagaactccatctggatttgttcagaacgctcggttgccgccgggcgttttttattggtgagaatccaagctagcttggcgagattttcatgagctaaggaagctaaatggagaaaaaaatcactggatataccaccgttgatatatcccaatggcatcgtaaagaacattttgaggcatttcagtcagttgctcaatgtaccta

SEQ ID NO: 171 - DNA, 1290 bp, Homo Sapiens
  misc_feature (912)..(912): n is a, c, g, or t
  misc_feature (926)..(926): n is a, c, g, or t
  misc_feature (960)..(960): n is a, c, g, or t
  misc_feature (962)..(962): n is a, c, g, or t
  misc_feature (969)..(969): n is a, c, g, or t
  misc_feature (981)..(981): n is a, c, g, or t
  misc_feature (984)..(984): n is a, c, g, or t
  misc_feature (987)..(987): n is a, c, g, or t
  misc_feature (991)..(991): n is a, c, g, or t
  misc_feature (1005)..(1005): n is a, c, g, or t
  misc_feature (1018)..(1018): n is a, c, g, or t
  misc_feature (1023)..(1023): n is a, c, g, or t
  misc_feature (1033)..(1033): n is a, c, g, or t
  misc_feature (1042)..(1042): n is a, c, g, or t
  misc_feature (1049)..(1049): n is a, c, g, or t
  misc_feature (1079)..(1079): n is a, c, g, or t
  misc_feature (1083)..(1083): n is a, c, g, or t
  misc_feature (1113)..(1113): n is a, c, g, or t
  misc_feature (1128)..(1128): n is a, c, g, or t
  misc_feature (1132)..(1132): n is a, c, g, or t
  misc_feature (1134)..(1134): n is a, c, g, or t
  misc_feature (1138)..(1138): n is a, c, g, or t
  misc_feature (1140)..(1140): n is a, c, g, or t
  misc_feature (1145)..(1145): n is a, c, g, or t
  misc_feature (1155)..(1155): n is a, c, g, or t
  misc_feature (1158)..(1158): n is a, c, g, or t
  misc_feature (1163)..(1163): n is a, c, g, or t
  misc_feature (1166)..(1166): n is a, c, g, or t
  misc_feature (1179)..(1179): n is a, c, g, or t
  misc_feature (1183)..(1184): n is a, c, g, or t
  misc_feature (1186)..(1187): n is a, c, g, or t
  misc_feature (1193)..(1193): n is a, c, g, or t
  misc_feature (1195)..(1195): n is a, c, g, or t
  misc_feature (1197)..(1197): n is a, c, g, or t
  misc_feature (1207)..(1207): n is a, c, g, or t
  misc_feature (1218)..(1220): n is a, c, g, or t
  misc_feature (1223)..(1223): n is a, c, g, or t
  misc_feature (1225)..(1225): n is a, c, g, or t
  misc_feature (1246)..(1247): n is a, c, g, or t
  misc_feature (1260)..(1261): n is a, c, g, or t
  misc_feature (1270)..(1270): n is a, c, g, or t
  misc_feature (1273)..(1273): n is a, c, g, or t
  misc_feature (1283)..(1283): n is a, c, g, or t
  misc_feature (1290)..(1290): n is a, c, g, or t
tagagaaattactatgagaggatcgcatcaccatcaccatcacggatcctatttaggtgacactatagaatcgtcgacccacgcgtccgggcgccgcggagggtcaggtcgtttctgcgcgggctcccggcgctgctactgctgctgctcttcctcgggccctggcccgctgcgagccacggcggcaagtactcgcgggagaagaaccagcccaagccgtccccgaaacgcgagtccggagaggagttccgcatggagaagttgaaccagctgtgggagaaggcccagcgactgcatcttcctcccgtgaggctggccgagctccacgctgatctgaagatacaggagagggacgaactcgcctggaagaaactaaagcttgacggcttggacgaagatggggagaaggaagcgagactcatacgcaacctcaatgtcatcttggccaagtatggtctggacggaaagaaggacgctcggcaggtgaccagcaactccctcagtggcacccaggaagacgggctggatgaccccaggctggaaaagctgtggcacaaggcgaagacctctgggaaattctccggcgaagaactggacaagctctggcgggagttcctgcatcacaaagagaaagttcacgagtacaacgtcctgctggagaccctgagcaggaccgaagaaatccacgagaacgtcattagcccctcggacctgagcgacatcaagggcagcgtcctgcacagcaggcacacggagctgaaggagaagctgcgcagcatcaaccagggcctggaccgcctgcgcagggtcagccaccagggctacagcactgaggctgagttcgaggagcccagggtgattgacctgtgggacctggcgcagtccgccaacctcacggacaaggagctggangcgttccgggaganctcaagcacttcgaagccaaatcgagaagcacancnctaccanaagcagctgganatngcncacnaaaactgaagcacncaaaaacgtggcnacgcnaacgtgtgancccaccccnaaaacancctgctggaaggcgaacaagactggctaancggnaaaaacatttgcaggactgtccggaagatnccaaactcgcaaaanaatntnaagncntgggnaccccccccnagnaaaanccncgggaaaactggntttnncnnggattntngnaacccccccngggttgggttnnngtntnaaaaaaaaatttttttttaannccccccccccaanngtttggggnaantttttttaanacccccn

SEQ ID NO: 172 - DNA, 880 bp, Homo Sapiens
aattaactatgagaggtcgcatcaccatcaccatcacggatcctatttaggtgacactatagaatcgtcgacccacgcgtccgcagacacggaccccgcaggagatgggtgcccccatccgcacactgtcctttggccaccggacatcatgcctcccaagaaggatgttcccgtgaagaaaccagcagggccctccatctccaaacctgctgctaagccagcagcagcaggggctcctccagccaagaccaaagctgagccagctgtcccccaggcccctcagaaaacccaggagcctccagtcgatctctccaaagtggtgatcgagtttaacaaggaccagctggaggagttcaaggaggccttcgagctgtttgaccgagtgggggatggcaagatcctgtacagccagtgtggggacgtgatgagggccctgggccagaaccccaccaacgccgaggtgctcaaggtcctggggaaccccaagagtgatgagctgaagtcgcggcgtgtggactttgagactttcctgcccatgctccaggcagtggccaagaaccgaggccaaggcacatatgaggactacttggaggggtttcgtgtgtttgacaaggaggggaacggcaaagtcatgggagcagagctcagacatgttctcaccacccttggagagaagatgactgaggaggaggtggagaccgttctggcaggacacgaggacagcaacggctgcatcaactacgaggccttcttgaaacacatcctaagcgtctgagtgctgcagatccagtggggtccggacactgggccccgcacgcgaaagcacgttccagccaccaggaggccacctattgtttcaaataagactgggttcctcgat

SEQ ID NO: 173 - DNA, 988 bp, Homo Sapiens
aattaactatgagaggtcgcatcaccatcaccatcacggatcctatttaggtgacactatagaatcgtcgacccacgcgtccgagaccttctcctcttcctcctcatccaagaagatgggcagcatcttcgaccgcgaggaccaggccagcccacgggccggcagcctggcggcgctcgagaaacggcaggccgagaagaagaaagagctgatgaaggcgcagagtctgcccaagacctcagcctcccaggcgcgcaaggccatgattgagaagctggagaaggagggcgcggccggcagccctggcggaccccgcgcagccgtgcagcgatccaccagcttcggggtccccaacgccaacagcatcaagcagatgctgctggactggtgtcgagccaagactcgcggctacgagcacgtcgacatccagaacttctcctccagctggagtgatgggatggccttctgtgccctggtgcacaacttcttccctgaggccttcgactatgggcagcttagccctcagaaccgacgccagaacttcgaggtggccttctcatctgcggagacccatgcggactgcccgcagctcctggatacagaggacatggtgcggcttcgagagcctgactggaagtgcgtgtacacgtacatccaggaattctaccgctgtctggtccagaaggggctggtaaaaaccaaaaagtcctaacccctgctcggggccccacggatgctggtggactgtgtgcccctggtggaggtggacgacatgatgatcatgggcaagaagcctgaccccaagtgtgtcttcacctatgtgcagtcgctctacaaccacctgcgacgccacgaactgcgcctgcgcggcaagaatgtctagcctgcccgcccgcatggccagccagtggcaagctgccgcccccactctccgggcaccgtctcctgcctgtgcgtccgcccaccgctgccctgtctgttgcgacac

SEQ ID NO: 174 - DNA, 889 bp, Homo Sapiens
  misc_feature (812)..(812): n is a, c, g, or t
  misc_feature (872)..(872): n is a, c, g, or t
  misc_feature (876)..(876): n is a, c, g, or t
tagagaaattactatgagaggatcgcatcaccatcaccatcacggatcctatttaggtgacactatagaatcgtcgacccacgcgtccgagccgccatcttgtgggagcaaaaccaacgcctggctcggagcagcagcctctgaggtgtccctggccagtgtccttccacctgtccacaagcatggggaacatcttcgccaacctcttcaagggcctttttggcaaaaaagaaatgcgcatcctcatggtgggcctggatgctgcagggaagaccacgatcctctacaagcttaagctgggtgagatcgtgaccaccattcccaccataggcttcaacgtggaaaccgtggagtacaagaacatcagcttcactgtgtgggacgtgggtggccaggacaagatccggcccctgtggcgccactacttccagaacacacaaggcctgatcttcgtggtggacagcaatgacagagagcgtgtgaacgaggcccgtgaggagctcatgaggatgctggccgaggacgagctccgggatgctgtcctcctggtgttcgccaacaagcaggacctccccaacgccatgaatgcggccgagatcacagacaagctggggctgcactcactacgccacaggaactggtacattcaggccacctgcgccaccagcggcgacgggctctatgaaggactggactggctgtccaatcagctccggaaccagaagtgaacgcgacccccctccctctcactcctcttgccctctgctttactctcatgtggcaaaacgtgcggctcgtggtgtgagtgccanaagctgcctccgtggttttggtcaccgtgtgcatcgcaccgtgctgtaaatgtggcaaangcancctgcggcccagg

SEQ ID NO: 175 - DNA, 1418 bp, Homo Sapiens
  misc_feature (2)..(2): n is a, c, g, or t
  misc_feature (819)..(819): n is a, c, g, or t
  misc_feature (909)..(909): n is a, c, g, or t
  misc_feature (911)..(911): n is a, c, g, or t
  misc_feature (926)..(927): n is a, c, g, or t
  misc_feature (929)..(929): n is a, c, g, or t
  misc_feature (935)..(935): n is a, c, g, or t
  misc_feature (942)..(942): n is a, c, g, or t
  misc_feature (960)..(960): n is a, c, g, or t
  misc_feature (965)..(965): n is a, c, g, or t
  misc_feature (968)..(968): n is a, c, g, or t
  misc_feature (971)..(971): n is a, c, g, or t
  misc_feature (981)..(981): n is a, c, g, or t
  misc_feature (995)..(995): n is a, c, g, or t
  misc_feature (1000)..(1000): n is a, c, g, or t
  misc_feature (1008)..(1008): n is a, c, g, or t
  misc_feature (1020)..(1021): n is a, c, g, or t
  misc_feature (1027)..(1029): n is a, c, g, or t
  misc_feature (1035)..(1035): n is a, c, g, or t
  misc_feature (1053)..(1053): n is a, c, g, or t
  misc_feature (1063)..(1063): n is a, c, g, or t
  misc_feature (1066)..(1066): n is a, c, g, or t
  misc_feature (1081)..(1081): n is a, c, g, or t
  misc_feature (1083)..(1083): n is a, c, g, or t
  misc_feature (1086)..(1086): n is a, c, g, or t
  misc_feature (1095)..(1095): n is a, c, g, or t
  misc_feature (1101)..(1101): n is a, c, g, or t
  misc_feature (1104)..(1104): n is a, c, g, or t
  misc_feature (1115)..(1115): n is a, c, g, or t
  misc_feature (1121)..(1121): n is a, c, g, or t
  misc_feature (1124)..(1124): n is a, c, g, or t
  misc_feature (1135)..(1135): n is a, c, g, or t
  misc_feature (1141)..(1141): n is a, c, g, or t
  misc_feature (1146)..(1146): n is a, c, g, or t
  misc_feature (1157)..(1157): n is a, c, g, or t
  misc_feature (1164)..(1164): n is a, c, g, or t
  misc_feature (1168)..(1168): n is a, c, g, or t
  misc_feature (1171)..(1171): n is a, c, g, or t
  misc_feature (1180)..(1180): n is a, c, g, or t
  misc_feature (1191)..(1191): n is a, c, g, or t
  misc_feature (1195)..(1195): n is a, c, g, or t
  misc_feature (1198)..(1198): n is a, c, g, or t
  misc_feature (1206)..(1206): n is a, c, g, or t
  misc_feature (1209)..(1209): n is a, c, g, or t
  misc_feature (1211)..(1211): n is a, c, g, or t
  misc_feature (1221)..(1221): n is a, c, g, or t
  misc_feature (1231)..(1231): n is a, c, g, or t
  misc_feature (1239)..(1239): n is a, c, g, or t
  misc_feature (1241)..(1241): n is a, c, g, or t
  misc_feature (1243)..(1244): n is a, c, g, or t
  misc_feature (1246)..(1246): n is a, c, g, or t
  misc_feature (1251)..(1251): n is a, c, g, or t
  misc_feature (1262)..(1262): n is a, c, g, or t
  misc_feature (1268)..(1268): n is a, c, g, or t
  misc_feature (1270)..(1271): n is a, c, g, or t
  misc_feature (1283)..(1284): n is a, c, g, or t
  misc_feature (1290)..(1293): n is a, c, g, or t
  misc_feature (1305)..(1305): n is a, c, g, or t
  misc_feature (1308)..(1309): n is a, c, g, or t
  misc_feature (1319)..(1319): n is a, c, g, or t
  misc_feature (1323)..(1323): n is a, c, g, or t
  misc_feature (1328)..(1328): n is a, c, g, or t
  misc_feature (1331)..(1331): n is a, c, g, or t
  misc_feature (1334)..(1337): n is a, c, g, or t
  misc_feature (1354)..(1359): n is a, c, g, or t
  misc_feature (1371)..(1372): n is a, c, g, or t
  misc_feature (1376)..(1377): n is a, c, g, or t
  misc_feature (1388)..(1388): n is a, c, g, or t
  misc_feature (1399)..(1400): n is a, c, g, or t
  misc_feature (1402)..(1402): n is a, c, g, or t
  misc_feature (1405)..(1405): n is a, c, g, or t
  misc_feature (1407)..(1407): n is a, c, g, or t
  misc_feature (1410)..(1410): n is a, c, g, or t
  misc_feature (1413)..(1413): n is a, c, g, or t
  misc_feature (1418)..(1418): n is a, c, g, or t
antagagaaattactatgagaggatcgcatcaccatcaccatcacggatcctatttaggtgacactatagaatcgtcgacccacgcgtccgcggacgcgtggggccgcggctgcggccactgcgcgctactccatggacagcctgagctccgagcggtactacctccagtcccccggtcctcaggggtcggagctggctgcgccctgctcactcttcccgtaccaggcggcggctggggcgccccacggacctgtgtacccggctcctaacggggcgcgctacccctacggctccatgctgccccccggcggcttccccgcggctgtgtgcccacccgggagggcgcagttcggcccaggagccggtgcgggcagtggcgcgggcggtagcagcggcgggggcggcggcccgggcacctatcagtacagccagggggctccgctctacgggccgtaccctggagccgcagcggcgggatcttgcggaggactggggggcctgggggttccaggttctggcttccgtgcccacgtctacctgtgcaaccggcctctgtggctcaaattccaccgccaccaaactgagatgatcattacgaaacagggcaggcgcatgtttcctttcttgagcttcaacataaacggactcaatcccactgcccactacaatgtgttcgtaaaggtggtgctggcggaccccaaccactggcgcttccaggggggcaaatgggtgacctgtggcaaagccgacaataacatgcagggcaacaaaatgtatgttcacccagagtctcctaatactggttcccactggatganacaggagatttcattcgggaaattaaaactcaccaataacaaaggcgcaaataacaacaacacccagatgatagtcttacaatcctttananaaataccaaaccccnnantgcaanattgttnaaattaaaaaagaatggngttgnaanaanttgaatgaancccttaaaaaaccnaaaantttttacntttttcaaaaanncaattnnnttgcantgactgcctaccaaaaanccgatattantcnaataaaaaattgatntnaancccctttgnaaaagnttncaaaaaaaatnataatnccnttaaacccttnaaaaanaaaangtaaattcttncccccgnaatnccnaaaatccanaaaaattcccngaangcngaaagggnttnantcttttttcnaaaccttttnaaaatttnantnnanccccnaattaaatggnaaaaantnncaaaaaaaaagnntttttnnnnaaaaaaaaaaanggnnacccccccangggnttttnccnttnnnnacttgaaaaaaaaaaannnnnnaaaaaaaaaatnnaaanncccaagaaaantcccccaaaanncnggnanaanaanttttn

SEQ ID NO: 176 - DNA, 854 bp, Homo Sapiens
  misc_feature (685)..(685): n is a, c, g, or t
  misc_feature (691)..(691): n is a, c, g, or t
  misc_feature (706)..(706): n is a, c, g, or t
  misc_feature (754)..(754): n is a, c, g, or t
  misc_feature (756)..(756): n is a, c, g, or t
  misc_feature (775)..(775): n is a, c, g, or t
  misc_feature (780)..(780): n is a, c, g, or t
  misc_feature (801)..(801): n is a, c, g, or t
  misc_feature (806)..(806): n is a, c, g, or t
  misc_feature (832)..(832): n is a, c, g, or t
  misc_feature (838)..(838): n is a, c, g, or t
  misc_feature (842)..(842): n is a, c, g, or t
  misc_feature (846)..(846): n is a, c, g, or t
  misc_feature (852)..(852): n is a, c, g, or t
agagaaattactatgagaggatcgcatcaccatcaccatcacggatcctatttaggtgacactatagaatcgtcgacccacgcgtccgcgcagatcacgcagtaccgcagccaccctgtggacgtgtatgccggcttcctcatcggggcgggcatcgctgcctacctggcctgccacgcggtgggcaacttccaggccccacctgcagagaagcccgcggccccggcccccgccaaggacgcgctgcgggccctgacgcagcggggccacgactcggtttatcagcagaataagtcggtgagcaccgacgagctggggcccccagggcggctggagggcgcgccccggcccgtggcccgcgagaagacctcgctgggcagcctgaagcgcgccagcgtggacgtggacctgctggccccgcgcagccccatggccaaggagaacatggtgaccttcagccacacgctgcccagggccagcgcgccctcgctggacgaccccgcgcgccgccacatgaccatccacgtgccgctggacgcctcgcgctccaagcagctcatcagcgagtggaagcagaagagcctggagggccgcggcctggggctgcccgacgacgccagccccgggcacctgcgcgcgcccgccgaacccatggcggaggaggaggaagaggaggaggacgaanaggaanaggaggaggaggaanaggaggaggacgagggcccggccccgccctcgctctaccccaccgtgnangcgcggccggggctggggncctcnggtcatcctcccaccgcgcgnggggncgccgccgctggtgcacatcccggangaaggngcgnaaangggggncg

SEQ ID NO: 177 - DNA, 172 bp, Homo Sapiens
gaattaactatgagaggtcgcatcaccatcaccatcacggatcctatttaggtgacactatagaatcgtcgacccacgcgtccgcccacgcgtccgcggacgcgtggggccaggttccggccgcggccaccctccgccgtccagggcccctccgacatggtgccggggcccg

SEQ ID NO: 178 - DNA, 1200 bp, Homo Sapiens
  misc_feature (1)..(1): n is a, c, g, or t
  misc_feature (932)..(932): n is a, c, g, or t
  misc_feature (957)..(957): n is a, c, g, or t
  misc_feature (977)..(977): n is a, c, g, or t
  misc_feature (1007)..(1007): n is a, c, g, or t
  misc_feature (1015)..(1015): n is a, c, g, or t
  misc_feature (1032)..(1033): n is a, c, g, or t
  misc_feature (1036)..(1037): n is a, c, g, or t
  misc_feature (1044)..(1044): n is a, c, g, or t
  misc_feature (1046)..(1046): n is a, c, g, or t
  misc_feature (1053)..(1054): n is a, c, g, or t
  misc_feature (1058)..(1058): n is a, c, g, or t
  misc_feature (1061)..(1061): n is a, c, g, or t
  misc_feature (1079)..(1079): n is a, c, g, or t
  misc_feature (1086)..(1086): n is a, c, g, or t
  misc_feature (1092)..(1092): n is a, c, g, or t
  misc_feature (1106)..(1106): n is a, c, g, or t
  misc_feature (1111)..(1111): n is a, c, g, or t
  misc_feature (1121)..(1121): n is a, c, g, or t
  misc_feature (1129)..(1129): n is a, c, g, or t
  misc_feature (1133)..(1133): n is a, c, g, or t
  misc_feature (1135)..(1136): n is a, c, g, or t
  misc_feature (1140)..(1140): n is a, c, g, or t
  misc_feature (1149)..(1149): n is a, c, g, or t
  misc_feature (1153)..(1153): n is a, c, g, or t
  misc_feature (1161)..(1161): n is a, c, g, or t
  misc_feature (1166)..(1166): n is a, c, g, or t
  misc_feature (1168)..(1168): n is a, c, g, or t
  misc_feature (1173)..(1173): n is a, c, g, or t
  misc_feature (1179)..(1179): n is a, c, g, or t
  misc_feature (1181)..(1181): n is a, c, g, or t
  misc_feature (1183)..(1183): n is a, c, g, or t
  misc_feature (1185)..(1185): n is a, c, g, or t
  misc_feature (1187)..(1187): n is a, c, g, or t
  misc_feature (1190)..(1190): n is a, c, g, or t
  misc_feature (1192)..(1193): n is a, c, g, or t
  misc_feature (1195)..(1195): n is a, c, g, or t
naattagagaaattactatgagaggatcgcatcaccatcaccatcacggatcctatttaggtgacactatagaatcgtcgacccacgcgtccgcccagatctacccagacccggagctggaagtacaagtattgggcctgcctatccgctgcatccacagtgaggagggctgccgctggagtgggccactacgtcatctacagggccacctgaatacctgcagcttcaatgtcattccctgccctaatcgctgccccatgaagctgagccgccgtgatctacctgcacacttgcagcatgactgccccaagcggcgcctcaagtgcgagttttgtggctgtgacttcagtggggaggcctatgagagccatgagggtatgtgcccccaagcgcactcagccctgcacctactgcactaaggagtttgtctttgacaccatccagagccaccagtaccagtgcccaaggctgcctgttgcctgccccaaccaatgtggtgtgggcactgtggctcgggaggacctgccaggccatctgaaggacagctgtaacaccgccctggtgctctgcccattcaaagactccggctgcaagcacaggtgccctaagctggcaatggcacggcatgtggaggagagtgtgaagccacatctggccatgatgtgtgccctggtgagccggcaacggcaggagctgcaggagcttcggcgagagctggaggagctatcagtgggcagtgatggcgtgctcatctggaagattggcagctatggacggcggctacaggaggccaaggccaagcccaaccttgagtgcttcagcccagccttctacacacataagtatggttacaagctgcaggtgtctgcattcctcaatggcaatggcagtggtgagggcacacacctctcactgtacattcgtgtgctgcntggtgcctttgaaaatctccttgantggcccttttgcccgccggngtcaccttctccctgctggatcaaaacgancctggggntggttaaaccacagcanntcnntgaaacntnccccccnnaccnaantggaaaaatttccaaaanccaggcncgtggnggggctccctgganaaaanttttctgggntttggttntccnanntttnttccccccngaanttcaaaancaaantnttggngggaanangnancnttncnncnggcgg

SEQ ID NO: 179 - DNA, 1388 bp, Homo Sapiens
  misc_feature (725)..(725): n is a, c, g, or t
  misc_feature (888)..(888): n is a, c, g, or t
  misc_feature (895)..(895): n is a, c, g, or t
  misc_feature (906)..(906): n is a, c, g, or t
  misc_feature (915)..(915): n is a, c, g, or t
  misc_feature (935)..(935): n is a, c, g, or t
  misc_feature (958)..(958): n is a, c, g, or t
  misc_feature (962)..(962): n is a, c, g, or t
  misc_feature (964)..(964): n is a, c, g, or t
  misc_feature (972)..(972): n is a, c, g, or t
  misc_feature (995)..(996): n is a, c, g, or t
  misc_feature (999)..(999): n is a, c, g, or t
  misc_feature (1003)..(1003): n is a, c, g, or t
  misc_feature (1005)..(1005): n is a, c, g, or t
  misc_feature (1026)..(1026): n is a, c, g, or t
  misc_feature (1030)..(1030): n is a, c, g, or t
  misc_feature (1036)..(1036): n is a, c, g, or t
  misc_feature (1046)..(1046): n is a, c, g, or t
  misc_feature (1052)..(1052): n is a, c, g, or t
  misc_feature (1054)..(1054): n is a, c, g, or t
  misc_feature (1062)..(1062): n is a, c, g, or t
  misc_feature (1073)..(1073): n is a, c, g, or t
  misc_feature (1075)..(1076): n is a, c, g, or t
  misc_feature (1078)..(1078): n is a, c, g, or t
  misc_feature (1081)..(1081): n is a, c, g, or t
  misc_feature (1087)..(1087): n is a, c, g, or t
  misc_feature (1090)..(1090): n is a, c, g, or t
  misc_feature (1093)..(1094): n is a, c, g, or t
  misc_feature (1097)..(1097): n is a, c, g, or t
  misc_feature (1099)..(1099): n is a, c, g, or t
  misc_feature (1104)..(1104): n is a, c, g, or t
  misc_feature (1106)..(1106): n is a, c, g, or t
  misc_feature (1109)..(1109): n is a, c, g, or t
  misc_feature (1118)..(1118): n is a, c, g, or t
  misc_feature (1124)..(1124): n is a, c, g, or t
  misc_feature (1126)..(1127): n is a, c, g, or t
  misc_feature (1130)..(1130): n is a, c, g, or t
  misc_feature (1149)..(1149): n is a, c, g, or t
  misc_feature (1154)..(1154): n is a, c, g, or t
  misc_feature (1156)..(1156): n is a, c, g, or t
  misc_feature (1161)..(1162): n is a, c, g, or t
  misc_feature (1167)..(1169): n is a, c, g, or t
  misc_feature (1173)..(1175): n is a, c, g, or t
  misc_feature (1177)..(1178): n is a, c, g, or t
  misc_feature (1183)..(1183): n is a, c, g, or t
  misc_feature (1190)..(1191): n is a, c, g, or t
  misc_feature (1203)..(1203): n is a, c, g, or t
  misc_feature (1215)..(1215): n is a, c, g, or t
  misc_feature (1224)..(1225): n is a, c, g, or t
  misc_feature (1233)..(1233): n is a, c, g, or t
  misc_feature (1235)..(1236): n is a, c, g, or t
  misc_feature (1239)..(1240): n is a, c, g, or t
  misc_feature (1245)..(1246): n is a, c, g, or t
  misc_feature (1249)..(1249): n is a, c, g, or t
  misc_feature (1259)..(1260): n is a, c, g, or t
  misc_feature (1262)..(1264): n is a, c, g, or t
  misc_feature (1266)..(1266): n is a, c, g, or t
  misc_feature (1269)..(1269): n is a, c, g, or t
  misc_feature (1271)..(1271): n is a, c, g, or t
  misc_feature (1283)..(1283): n is a, c, g, or t
  misc_feature (1287)..(1287): n is a, c, g, or t
  misc_feature (1292)..(1292): n is a, c, g, or t
  misc_feature (1294)..(1295): n is a, c, g, or t
  misc_feature (1299)..(1299): n is a, c, g, or t
  misc_feature (1303)..(1303): n is a, c, g, or t
  misc_feature (1305)..(1305): n is a, c, g, or t
  misc_feature (1310)..(1310): n is a, c, g, or t
  misc_feature (1316)..(1316): n is a, c, g, or t
  misc_feature (1320)..(1321): n is a, c, g, or t
  misc_feature (1328)..(1328): n is a, c, g, or t
  misc_feature (1332)..(1333): n is a, c, g, or t
  misc_feature (1344)..(1344): n is a, c, g, or t
  misc_feature (1348)..(1350): n is a, c, g, or t
  misc_feature (1354)..(1354): n is a, c, g, or t
  misc_feature (1356)..(1356): n is a, c, g, or t
  misc_feature (1362)..(1362): n is a, c, g, or t
  misc_feature (1371)..(1372): n is a, c, g, or t
  misc_feature (1374)..(1374): n is a, c, g, or t
  misc_feature (1380)..(1380): n is a, c, g, or t
  misc_feature (1385)..(1385): n is a, c, g, or t
  misc_feature (1387)..(1388): n is a, c, g, or t
tagagaaattactatgagaggatcgcatcaccatcaccatcacggatcctatttaggtgacactatagaatcgtcgacccacgcgtccggtgaccaaggcggccatgattgtgaaccagctgtcgaagaaggaggcgtcgcggcgggccctgatgggctcgccccagctggtggccgctgtcgtgcgtaccatgcagaataccagcgacctggacacagcccgctgcaccaccagcatcctgcacaacctctcccaccaccgggaggggctgctcgccatcttcaagtcgggtggcatccctgctctggtccgcatgctcagctcccctgtggagtcggtcctgttctatgccatcaccacgctgcacaacctgctcctgtaccaggagggcgccaagatggccgtgcgcctggccgacgggctgcaaaagatggtgcccctgctcaacaagaacaaccccaagttcctggccatcaccaccgactgcctgcagctcctggcctacggcaaccaggagagcaagctgatcatcctggccaatggtgggccccaggccctcgtgcagatcatgcgtaactacagttatgaaaagctgctctggaccaccagtcgtgtgctcaaggtgctatccgtgtgtcccagcaataagcctgccattgtggaggctggtgggatgcaggccctgggcaagcacctgaccagcaacagcccccgcctggtgcanaactgcctgtggaccctgcgcaacctctcagatgtggccaccaagcaggagggcctggagagtgtgctgaaaattctggtgaatcagctgagtgtggatgacgtcaacgtccctcacctgtgccacgggcacactctccaacctgacatgcaacaacagcaanaacaaanacgctggtganacaaaaaancggtgtggaggctcttatcnatgccatcctgcgtggtggtganaagnanaaattcanggaacctgccgtttgcgctttgnnccncttnantaaccgccaaccttgaggccnaaantggccnaaaaattttntgcgtntnaatttggnattccaacccntnngnaantttttnaancannccnancaatngnccnttggtcaangaaacntnncgntttaataaagaaatttggnccttntnccaannaaaannncccnnntnnagaangaaggtnnaccccccccttntcaatttttggnaaagccccnnaaattccnannccnntattnnggncaaaaaaccnnannnanggngnagaaagaaaaanttgnggttncnnaaanttantnccccngaaccnaaannaaggaanttcnncacaccctccntttnnncccnancccggnaaaaaaacnngntcgggnttttntnn

SEQ ID NO: 180 - DNA, 971 bp, Homo Sapiens
taactatgagaggtcgcatcaccatcaccatcacggatcctatttaggtgacactatagaatcgtcgacccacgcgtccgcccacgcgtccgagccgcctgggcggcctggcctgtacggggcgggggaggccatggcctcggctgagttgcaggggaagtaccagaagctggctcaggagtactcgaagcttcgggctcagaatcaggttctgaaaaaaggtgttgtggatgaacaagcaaattctgcagctttaaaggagcaactgaaaatgaaggatcagtcattgagaaaactacaacaggaaatggacagtttgacatttcgaaatctgcagcttgccaagagggtagaactacttcaagatgaactagctctaagtgaaccacgaggcaagaaaaacaagaaaagtggagaatcttcttctcagttgagtcaagagcagaagagtgtctttgatgaagatctgcaaaagaagatagaagagaatgaacggttgcatatacaattttttgaagctgatgagcagcacaagcatgtggaagcagagctgaggagtcgactggccactctggagacagaagcagcccagcaccaagctgtggttgacggtctcacccggaagtacatggaaaccattgagaagctgcagaacgacaaggctaaactagaagtgaaatctcagactctagaaaaggaagccaaggaatgtcgacttcgaacggaagaatgtcaattacagttaaagactcttcatgaagatttgtcaggtagattagaggaatccttatcaatcatcaatgaaaaagtaccttttaatgatacaaaatatagtcagtacaacgctctgaacgttccactccacaataggagacaccagctgaagatgcgagatattgctgggcaggccctggcttttgttcaggatcttgtgacggctcttctaaacttttcatacctacacagaacag

SEQ ID NO: 181 - DNA, 1387 bp, Homo Sapiens
  misc_feature (7)..(7): n is a, c, g, or t
  misc_feature (856)..(856): n is a, c, g, or t
  misc_feature (859)..(859): n is a, c, g, or t
  misc_feature (880)..(880): n is a, c, g, or t
  misc_feature (916)..(916): n is a, c, g, or t
  misc_feature (940)..(940): n is a, c, g, or t
  misc_feature (961)..(961): n is a, c, g, or t
  misc_feature (968)..(968): n is a, c, g, or t
  misc_feature (976)..(976): n is a, c, g, or t
  misc_feature (998)..(998): n is a, c, g, or t
  misc_feature (1022)..(1023): n is a, c, g, or t
  misc_feature (1025)..(1025): n is a, c, g, or t
  misc_feature (1042)..(1042): n is a, c, g, or t
  misc_feature (1096)..(1096): n is a, c, g, or t
  misc_feature (1101)..(1101): n is a, c, g, or t
  misc_feature (1105)..(1105): n is a, c, g, or t
  misc_feature (1113)..(1113): n is a, c, g, or t
  misc_feature (1123)..(1123): n is a, c, g, or t
  misc_feature (1129)..(1129): n is a, c, g, or t
  misc_feature (1135)..(1135): n is a, c, g, or t
  misc_feature (1137)..(1137): n is a, c, g, or t
  misc_feature (1141)..(1141): n is a, c, g, or t
  misc_feature (1153)..(1153): n is a, c, g, or t
  misc_feature (1156)..(1156): n is a, c, g, or t
  misc_feature (1171)..(1172): n is a, c, g, or t
  misc_feature (1176)..(1176): n is a, c, g, or t
  misc_feature (1180)..(1180): n is a, c, g, or t
  misc_feature (1188)..(1188): n is a, c, g, or t
  misc_feature (1190)..(1190): n is a, c, g, or t
  misc_feature (1195)..(1195): n is a, c, g, or t
  misc_feature (1199)..(1199): n is a, c, g, or t
  misc_feature (1202)..(1202): n is a, c, g, or t
  misc_feature (1209)..(1209): n is a, c, g, or t
  misc_feature (1215)..(1215): n is a, c, g, or t
  misc_feature (1219)..(1219): n is a, c, g, or t
  misc_feature (1221)..(1222): n is a, c, g, or t
  misc_feature (1228)..(1228): n is a, c, g, or t
  misc_feature (1230)..(1231): n is a, c, g, or t
  misc_feature (1236)..(1237): n is a, c, g, or t
  misc_feature (1239)..(1239): n is a, c, g, or t
  misc_feature (1246)..(1246): n is a, c, g, or t
  misc_feature (1250)..(1251): n is a, c, g, or t
  misc_feature (1268)..(1268): n is a, c, g, or t
  misc_feature (1272)..(1273): n is a, c, g, or t
  misc_feature (1285)..(1285): n is a, c, g, or t
  misc_feature (1288)..(1289): n is a, c, g, or t
  misc_feature (1291)..(1292): n is a, c, g, or t
  misc_feature (1294)..(1299): n is a, c, g, or t
  misc_feature (1301)..(1301): n is a, c, g, or t
  misc_feature (1303)..(1303): n is a, c, g, or t
  misc_feature (1308)..(1308): n is a, c, g, or t
  misc_feature (1324)..(1324): n is a, c, g, or t
  misc_feature (1329)..(1332): n is a, c, g, or t
  misc_feature (1337)..(1337): n is a, c, g, or t
  misc_feature (1340)..(1340): n is a, c, g, or t
  misc_feature (1344)..(1345): n is a, c, g, or t
  misc_feature (1350)..(1350): n is a, c, g, or t
  misc_feature (1353)..(1353): n is a, c, g, or t
  misc_feature (1360)..(1360): n is a, c, g, or t
  misc_feature (1366)..(1367): n is a, c, g, or t
  misc_feature (1369)..(1369): n is a, c, g, or t
  misc_feature (1371)..(1371): n is a, c, g, or t
atagagnaattactatgagaggatcgcatcaccatcaccatcacggatcctatttaggtgacactatagaatcgtcgacccacgcgtccgcggacgcgtgggctgcggggatgtatttggaacattatctggacaacctgaaggctgaaattgacaagttggccactgagtatatgagtagtgcccgcagcctgagctccgaggaaaaattggcccttctcaaacagatccaggaagcctatggcaagtgcaaggaatttggtgacgacaaggtgcagcttgccatgcagacctatgagatggtggacaaacacattcggcggctggacacagacctggcccgttttgaggctgatctcaaggagaaacagattgagtcaagtgactatgacagctcttccagcaaaggcaaaaagagccggactcaaaaggagaagaaagctgctcgtgctcgttccaaagggaaaaactcggatgaagaagcccccaagactgcccagaagaagttaaagctcgtgcgcacgtctcctatggagagatgattggctgtgacaaccctgattgttccattgagtggttccattttgcctgtgtggggctgacaaccaagcctcgggggaaatggttttgcccacgctgctcccaagaacggaagaagaaatagataagggccttggattccaacacagtttcttccacatcccctgacttgggctagtgggcagaggaatgcctgtgctggggccaggggttcagggaggagtggatggcacagtgctgtcatcccttctcctccccctctccccactcccggtgctgaggctgcatcaaaccctggtagggaggggtgccgcanccnctaacggtatgtgctctcctncagccctctcccttcggagggacgtggtcttgcccnctgtccttttgcctccatgctgangtcgggggctgtatttcaaanggagggnccttttcnttccccttgctttggaattaangactgggggcataacatgggggcnntncccccaaacctctttcnttcccccctcctggggggagggctagggggggataaaaacttttcttccccatnccctnccgnttttttcngggggggggncccccngtcttnanggcnttggccctaatnaanggcccccccttcctnntccnaaanatttcccntngaaangggncangggaatncaaaantccntnnaaaggnanntgggnngnaaaaaancttnnttttaaaaaaaaaaaangggnncccccccagggncannanntnnnnnnantngcccngtgaaaccaaaccccnacccnnnnttttnaancccnngcccnggnttttttnggaaanncntnggaatttaaaaaaaaa

SEQ ID NO: 182 - DNA, 1056 bp, Homo Sapiens
aattaactatgagaggtcgcatcaccatcaccatcacggatcctatttaggtgacactatagaatcgtcgacccacgcgtccggcccgagcggagcgccgcacgttcccaaccgcgaggccagacatctgactgttggtgtgagaccagtgctcctggtggtgtgccctgagccatggaggcgcctttgcagacagagatggtggagctggtgcccaatggcaaacactcagaggggctgctcccggtcatcacccccatggcaggcaaccagagggtcgaggaccctgcacggagctgtatggagggcaagagcttcctacagaaaagtcccagcaaggagccacacttcactgacttcgaggggaagacatcattcgggatgtcagtgttcaacctcagcaatgccatcatgggcagcggcatcctgggactcgcctatgccatggccaatacgggcattatccttttcctgttcctgttgacagctgtcgccttgctctccagctactccatccacctgctactcaagtcctcaggggtcgtgggcatccgtgcctatgagcagctgggctaccgtgcctttgggaccccaggaaagctggcagcagccctggccatcacgctccagaacatcggagccatgtccagctacctgtacatcatcaagtctgagctgccacttgtcatacagaccttcctgaacctggaggagaaaacctcggactggtacatgaacgggaactacctggtaatccttgtctctgtcaccatcattctgcccctggcactgatgcggcagcttggctacctgggctactccagcggcttctctcttagctgcatggtgttcttcctaattgcagtcatctacaaaaagttccacgtgccctgcccactgccccccaacttcaacaacaccacaggcaacttcagccacgtggagatcgtgaaggagaaaggtgcagctgcaggtcgagcctgaggcttcagccttctgcactcccagctacttcacgctcaactcacagacagcatacaccatccccatcatgct

SEQ ID NO: 183 - DNA, 911 bp, Homo Sapiens
agaggtcgcatcaccatcaccatcacggatcctatttaggtgacactatagaatcgtcgacccacgcgtccgagaacccaaagaaaggcaaagagtcctgcccggcaccggcgccgcgtgggccaaacctgcgcccgtggaggggcgcgcagagggcaccgggcgccgggagcaggcggcgcagcaccagcattgtgttagtgccgggaggccactgtgtcagcaagctgagagggaaactgaagcaagatgtcgggccggagtgggaagaagaaaatgtccaagctgtcccgttcagctagggcaggtgtcatctttccagtggggaggctgatgcgttatctgaagaaagggacgttcaagtaccggatcagcgtgggcgcccctgtctacatggcggcagtcattgagtacctggcagcggaaattctagaattggccggcaatgccgcgagggacaacaagaaggcccggatagccccgagacacatcttgctggcagttgccaatgacgaggagctcaaccagctgctaaaaggagtgaccatcgccagtggaggcgtcctgcccagaattcaccccgaactgctggccaaaaagcgagggaccaaaggcaagtcggaaacgatcctctccccacccccagagaaaagaggcaggaaggccacgtcaggcaagaagggggggaagaaatccaaggctgccaaaccacggacgtccaaaaagtccaaaccaaaggacagcgataaagaaggaacttcaaattccacctctgaagatgggccaggggatggattcaccattctgtcttctaagagccttgttctgggacagaagctgtccttaacccagagtgacatcagccatattggctccatgagagtggagggcattgtccacccaaccacagc

SEQ ID NO: 184 - DNA, 1382 bp, Homo Sapiens
  misc_feature (788)..(788): n is a, c, g, or t
  misc_feature (857)..(857): n is a, c, g, or t
  misc_feature (859)..(859): n is a, c, g, or t
  misc_feature (887)..(887): n is a, c, g, or t
  misc_feature (896)..(897): n is a, c, g, or t
  misc_feature (902)..(902): n is a, c, g, or t
  misc_feature (907)..(907): n is a, c, g, or t
  misc_feature (922)..(922): n is a, c, g, or t
  misc_feature (931)..(931): n is a, c, g, or t
  misc_feature (940)..(940): n is a, c, g, or t
  misc_feature (960)..(960): n is a, c, g, or t
  misc_feature (979)..(979): n is a, c, g, or t
  misc_feature (991)..(991): n is a, c, g, or t
  misc_feature (1002)..(1002): n is a, c, g, or t
  misc_feature (1005)..(1005): n is a, c, g, or t
  misc_feature (1010)..(1011): n is a, c, g, or t
  misc_feature (1013)..(1014): n is a, c, g, or t
  misc_feature (1017)..(1017): n is a, c, g, or t
  misc_feature (1022)..(1025): n is a, c, g, or t
  misc_feature (1030)..(1030): n is a, c, g, or t
  misc_feature (1034)..(1034): n is a, c, g, or t
  misc_feature (1045)..(1045): n is a, c, g, or t
  misc_feature (1058)..(1058): n is a, c, g, or t
  misc_feature (1063)..(1063): n is a, c, g, or t
  misc_feature (1072)..(1072): n is a, c, g, or t
  misc_feature (1081)..(1081): n is a, c, g, or t
  misc_feature (1095)..(1095): n is a, c, g, or t
  misc_feature (1109)..(1109): n is a, c, g, or t
  misc_feature (1111)..(1112): n is a, c, g, or t
  misc_feature (1114)..(1114): n is a, c, g, or t
  misc_feature (1116)..(1116): n is a, c, g, or t
  misc_feature (1123)..(1123): n is a, c, g, or t
  misc_feature (1137)..(1137): n is a, c, g, or t
  misc_feature (1143)..(1143): n is a, c, g, or t
  misc_feature (1146)..(1146): n is a, c, g, or t
  misc_feature (1149)..(1149): n is a, c, g, or t
  misc_feature (1156)..(1157): n is a, c, g, or t
  misc_feature (1162)..(1162): n is a, c, g, or t
  misc_feature (1168)..(1169): n is a, c, g, or t
  misc_feature (1173)..(1175): n is a, c, g, or t
  misc_feature (1177)..(1177): n is a, c, g, or t
  misc_feature (1185)..(1185): n is a, c, g, or t
  misc_feature (1202)..(1202): n is a, c, g, or t
  misc_feature (1204)..(1204): n is a, c, g, or t
  misc_feature (1207)..(1207): n is a, c, g, or t
  misc_feature (1215)..(1215): n is a, c, g, or t
  misc_feature (1217)..(1218): n is a, c, g, or t
  misc_feature (1224)..(1224): n is a, c, g, or t
  misc_feature (1227)..(1227): n is a, c, g, or t
  misc_feature (1229)..(1229): n is a, c, g, or t
  misc_feature (1239)..(1240): n is a, c, g, or t
  misc_feature (1242)..(1242): n is a, c, g, or t
  misc_feature (1245)..(1245): n is a, c, g, or t
  misc_feature (1251)..(1251): n is a, c, g, or t
  misc_feature (1255)..(1255): n is a, c, g, or t
  misc_feature (1265)..(1266): n is a, c, g, or t
  misc_feature (1268)..(1269): n is a, c, g, or t
  misc_feature (1273)..(1273): n is a, c, g, or t
  misc_feature (1276)..(1276): n is a, c, g, or t
  misc_feature (1283)..(1283): n is a, c, g, or t
  misc_feature (1292)..(1292): n is a, c, g, or t
  misc_feature (1295)..(1295): n is a, c, g, or t
  misc_feature (1309)..(1309): n is a, c, g, or t
  misc_feature (1314)..(1314): n is a, c, g, or t
  misc_feature (1317)..(1317): n is a, c, g, or t
  misc_feature (1319)..(1320): n is a, c, g, or t
  misc_feature (1322)..(1322): n is a, c, g, or t
  misc_feature (1327)..(1327): n is a, c, g, or t
  misc_feature (1332)..(1332): n is a, c, g, or t
  misc_feature (1339)..(1339): n is a, c, g, or t
  misc_feature (1341)..(1341): n is a, c, g, or t
  misc_feature (1344)..(1344): n is a, c, g, or t
  misc_feature (1346)..(1346): n is a, c, g, or t
  misc_feature (1357)..(1357): n is a, c, g, or t
  misc_feature (1360)..(1362): n is a, c, g, or t
  misc_feature (1364)..(1365): n is a, c, g, or t
  misc_feature (1378)..(1379): n is a, c, g, or t
tagagaaattactatgagaggatcgcatcaccatcaccatcacggatcctatttaggtgacactatagaatcgtcgacccacgcgtccgggggcctgtgccaagcacttccacaccatggctgccatgaagaaccacttgcgccggcacagtcggcggcggagcaggcggcatcggaagcgggctggcggtgccagcggtgggagagaagccaaactcctggcagcggagagctggacccgggagctagaagacaatgaaggcctggagtctccccaagacccttcaggggaaagtcctcatggggctgaaggcaacctggaaagtgatggggactgtttgcaggctgaatctgaaggggacaaatgtgggcttgagagggatgagacccatttccagggtgataaagagagcggaggcactggggaaggactggaaaggaaggatgccagtttacttgacaacttggacatcccaggtgaggaaggtggtggcactcacttctgcgatagcctcactggggtggatgaagaccagaagccagccactggccaacccaactcctcttcccactctgccaatgctgtcactggctggcaggctggggccgctcacacatgctctgactgtgggcattctttcccccatgccactggcctgctgagccacaggccctgccacccaccaggcatctatcagtgctccctctgcccgaaggagtttgactctctgcctgccctccgcagccacttccagaaccataggcctggggaggcgacctcagcacancctttcctctgctgcctctgtggcatgatcttccctgggcgggctggctacaggcttcaccggcgccangncccacagcttcctcttggcatgactganggctcaaannagganggggnaaaagaaagaattgnaaaaggcancccctgcangcaatccaccactgcaactntcgaaaacaaaacttgctnaatcaactgcanccgggagttgnaanccctnnannatncaggnnnngggcncctntgttgctgctntgggtcaaactanaatanccttggganaccctgaangtcccccccaaatncaaatttttggaantnntncnaaaaagnctcccccccttttnaattgncangtnatccctnnaaatngtcctnngaannncncttttaanaaaaatatgaatttttntnctnggaaaagngnnaaattnccnantctaaaaagnnanagncccccntttngaaaaccccnntnncccnggnggaaaanttttttaanttncccccccccctttnctttnaangnntnaaaanttttnatggggncncgngntacccccaatnccnnngnnattttcccctttnnccc

SEQ ID NO: 185 - DNA, 1395 bp, Homo Sapiens
  misc_feature (936)..(936): n is a, c, g, or t
  misc_feature (965)..(965): n is a, c, g, or t
  misc_feature (967)..(968): n is a, c, g, or t
  misc_feature (991)..(991): n is a, c, g, or t
  misc_feature (1029)..(1029): n is a, c, g, or t
  misc_feature (1031)..(1031): n is a, c, g, or t
  misc_feature (1034)..(1034): n is a, c, g, or t
  misc_feature (1045)..(1045): n is a, c, g, or t
  misc_feature (1047)..(1047): n is a, c, g, or t
  misc_feature (1049)..(1049): n is a, c, g, or t
  misc_feature (1053)..(1053): n is a, c, g, or t
  misc_feature (1118)..(1118): n is a, c, g, or t
  misc_feature (1120)..(1120): n is a, c, g, or t
  misc_feature (1123)..(1124): n is a, c, g, or t
  misc_feature (1132)..(1132): n is a, c, g, or t
  misc_feature (1134)..(1134): n is a, c, g, or t
  misc_feature (1140)..(1140): n is a, c, g, or t
  misc_feature (1142)..(1142): n is a, c, g, or t
  misc_feature (1149)..(1149): n is a, c, g, or t
  misc_feature (1174)..(1174): n is a, c, g, or t
  misc_feature (1177)..(1178): n is a, c, g, or t
  misc_feature (1181)..(1181): n is a, c, g, or t
  misc_feature (1185)..(1185): n is a, c, g, or t
  misc_feature (1187)..(1187): n is a, c, g, or t
  misc_feature (1190)..(1191): n is a, c, g, or t
  misc_feature (1195)..(1195): n is a, c, g, or t
  misc_feature (1197)..(1197): n is a, c, g, or t
  misc_feature (1199)..(1199): n is a, c, g, or t
  misc_feature (1229)..(1229): n is a, c, g, or t
  misc_feature (1248)..(1248): n is a, c, g, or t
  misc_feature (1251)..(1251): n is a, c, g, or t
  misc_feature (1256)..(1257): n is a, c, g, or t
  misc_feature (1260)..(1260): n is a, c, g, or t
  misc_feature (1263)..(1265): n is a, c, g, or t
  misc_feature (1273)..(1273): n is a, c, g, or t
  misc_feature (1277)..(1277): n is a, c, g, or t
  misc_feature (1279)..(1279): n is a, c, g, or t
  misc_feature (1282)..(1282): n is a, c, g, or t
  misc_feature (1296)..(1296): n is a, c, g, or t
  misc_feature (1300)..(1300): n is a, c, g, or t
  misc_feature (1302)..(1302): n is a, c, g, or t
  misc_feature (1310)..(1310): n is a, c, g, or t
  misc_feature (1328)..(1328): n is a, c, g, or t
  misc_feature (1332)..(1332): n is a, c, g, or t
  misc_feature (1334)..(1334): n is a, c, g, or t
  misc_feature (1336)..(1337): n is a, c, g, or t
  misc_feature (1341)..(1341): n is a, c, g, or t
  misc_feature (1347)..(1348): n is a, c, g, or t
  misc_feature (1351)..(1352): n is a, c, g, or t
  misc_feature (1354)..(1354): n is a, c, g, or t
  misc_feature (1357)..(1361): n is a, c, g, or t
  misc_feature (1367)..(1367): n is a, c, g, or t
  misc_feature (1369)..(1369): n is a, c, g, or t
  misc_feature (1371)..(1371): n is a, c, g, or t
  misc_feature (1379)..(1380): n is a, c, g, or t
  misc_feature (1395)..(1395): n is a, c, g, or t
atagagagattactatgagaggatcgcatcaccatcaccatcacggatcctatttaggtgacactatagaatcgtcgacccacgcgtccgagcgggggaagatggcggcggccgttccacagcgggcgtggaccgtggagcagctgcgcagtgagcagctgcccaagaaggacattatcaagtttctgcaggaacacggttcagattcgtttcttgcagaacataaattattaggaaacattaaaaatgtggccaagacagctaacaaggaccacttggttacagcctataaccatctttttgaaactaagcgttttaagggtactgaaagtataagtaaagtgtctgagcaagtaaaaaatgtgaagcttaatgaagataaacccaaagaaaccaagtctgaagagaccctggatgagggtccaccaaaatatactaaatctgttctgaaaaagggagataaaaccaactttcccaaaaagggagatgttgttcactgctggtatacaggaacactacaagatgggactgtttttgatactaatattcaaacaagtgcaaagaagaagaaaaatgccaagcctttaagttttaaggtcggagtaggcaaagttatcagaggatgggatgaagctctcttgactatgagtaaaggagaaaaggctcgactggagattgaaccagaatgggcttacggaaagaaaggacagcctgatgccaaaattccaccaaatgcaaaactcacttttgaagtggaattagtggatattgattgaaaatagcagtgcttcagctctaaggatattagcaacaatgataaaacttggccttgaagaatttacacaactagttagaacttgttactattgtaagggaagagtcaactggaaaattcaaggagttaataaaatttgtttacttggtccccaccttttngagaaaaaaatcccttatgaatccccggncnnaaatacttttcctacagctgtgntaaatactggtccaggaaaaactttttcccttttaccncntgntggaaaacttnangnggcnccaataaaaattgatccccctgtcttgaaaaaaaaaaaaaaaaaaaaaaaaaaaaaggggggccncnccnnaagggggncnaataancnttaattnacctgacctggaccccggtgaaaanccnnaangccncnaanncccncngnatttttcaaaccccccggttgcccccgggnttttttttggggaaacccnccncttgnnaanttnnnggcctagnaccnanggnaaaaacccgggaancccntnaaatcccnggcccaaaaaatttgggntttncntnnccgnccaaannccnncnggnnnnncctttnancnaaaaaacnnttttccctttttctn

SEQ ID NO: 186 - DNA, 697 bp, Homo Sapiens
gtcgcatcaccatcaccatcacggatcctatttaggtgacactatagaatcgtcgacccacgcgtccgcccacgcgtccggaactagcgggttgctaaccacagggccgatgctgccaagggtcctggcggcagagaccacgtcccagcaggagcggctgcaggccatcgcagagaagcggaagcggcaggcggagatcgagaacaagcgccggcagctggaggacgagcggaggcagctgcagcacctgaagtccaaggcactgcgggagcgctggctgctggaggggacgccgtcctcggcctcagagggggatgaggacctgaggaggcagatgcaggacgacgagcagaagacacggctgctggaggactcggtgtccaggttggagaaggaaattgaggtgctggagcgtggagactccgccccagccactgccaaggagaacgcggcggccccgagcccagtccgggccccagccccgagtccagccaaggaggagcgcaagacagaggtggtgatgaattcacagcagacgccggtgggcacgcccaaagacaagcgagtctccaacacgcccctgaggacggttgacggctcccccatgatgaaggcagtggtccatgctgtggacggcaccgccgagaacgggatccaccccctgagctcctccgaggtggacgaactcatccacaaa

SEQ ID NO: 187 - DNA, 1377 bp, Homo Sapiens
  misc_feature (716)..(716): n is a, c, g, or t
  misc_feature (805)..(805): n is a, c, g, or t
  misc_feature (819)..(819): n is a, c, g, or t
  misc_feature (841)..(841): n is a, c, g, or t
  misc_feature (856)..(856): n is a, c, g, or t
  misc_feature (877)..(877): n is a, c, g, or t
  misc_feature (888)..(888): n is a, c, g, or t
  misc_feature (931)..(931): n is a, c, g, or t
  misc_feature (940)..(940): n is a, c, g, or t
  misc_feature (946)..(946): n is a, c, g, or t
  misc_feature (965)..(966): n is a, c, g, or t
  misc_feature (975)..(976): n is a, c, g, or t
  misc_feature (994)..(994): n is a, c, g, or t
  misc_feature (1030)..(1030): n is a, c, g, or t
  misc_feature (1037)..(1037): n is a, c, g, or t
  misc_feature (1048)..(1048): n is a, c, g, or t
  misc_feature (1055)..(1055): n is a, c, g, or t
  misc_feature (1058)..(1058): n is a, c, g, or t
  misc_feature (1062)..(1062): n is a, c, g, or t
  misc_feature (1072)..(1072): n is a, c, g, or t
  misc_feature (1076)..(1077): n is a, c, g, or t
  misc_feature (1080)..(1080): n is a, c, g, or t
  misc_feature (1092)..(1093): n is a, c, g, or t
  misc_feature (1101)..(1101): n is a, c, g, or t
  misc_feature (1103)..(1105): n is a, c, g, or t
  misc_feature (1108)..(1108): n is a, c, g, or t
  misc_feature (1113)..(1113): n is a, c, g, or t
  misc_feature (1118)..(1118): n is a, c, g, or t
  misc_feature (1122)..(1124): n is a, c, g, or t
  misc_feature (1132)..(1132): n is a, c, g, or t
  misc_feature (1143)..(1143): n is a, c, g, or t
  misc_feature (1152)..(1152): n is a, c, g, or t
  misc_feature (1157)..(1158): n is a, c, g, or t
  misc_feature (1166)..(1166): n is a, c, g, or t
  misc_feature (1172)..(1172): n is a, c, g, or t
  misc_feature (1182)..(1182): n is a, c, g, or t
  misc_feature (1197)..(1198): n is a, c, g, or t
  misc_feature (1204)..(1206): n is a, c, g, or t
  misc_feature (1209)..(1209): n is a, c, g, or t
  misc_feature (1212)..(1212): n is a, c, g, or t
  misc_feature (1219)..(1219): n is a, c, g, or t
  misc_feature (1222)..(1222): n is a, c, g, or t
  misc_feature (1224)..(1224): n is a, c, g, or t
  misc_feature (1227)..(1227): n is a, c, g, or t
  misc_feature (1229)..(1229): n is a, c, g, or t
  misc_feature (1237)..(1239): n is a, c, g, or t
  misc_feature (1243)..(1243): n is a, c, g, or t
  misc_feature (1250)..(1250): n is a, c, g, or t
  misc_feature (1252)..(1253): n is a, c, g, or t
  misc_feature (1266)..(1266): n is a, c, g, or t
  misc_feature (1270)..(1270): n is a, c, g, or t
  misc_feature (1280)..(1281): n is a, c, g, or t
  misc_feature (1284)..(1285): n is a, c, g, or t
  misc_feature (1289)..(1290): n is a, c, g, or t
  misc_feature (1294)..(1294): n is a, c, g, or t
  misc_feature (1296)..(1298): n is a, c, g, or t
  misc_feature (1300)..(1301): n is a, c, g, or t
  misc_feature (1303)..(1304): n is a, c, g, or t
  misc_feature (1309)..(1311): n is a, c, g, or t
  misc_feature (1315)..(1317): n is a, c, g, or t
  misc_feature (1321)..(1322): n is a, c, g, or t
  misc_feature (1325)..(1325): n is a, c, g, or t
  misc_feature (1330)..(1331): n is a, c, g, or t
  misc_feature (1333)..(1334): n is a, c, g, or t
  misc_feature (1342)..(1343): n is a, c, g, or t
  misc_feature (1345)..(1346): n is a, c, g, or t
  misc_feature (1348)..(1348): n is a, c, g, or t
  misc_feature (1350)..(1350): n is a, c, g, or t
  misc_feature (1352)..(1352): n is a, c, g, or t
  misc_feature (1354)..(1355): n is a, c, g, or t
  misc_feature (1362)..(1362): n is a, c, g, or t
  misc_feature (1367)..(1370): n is a, c, g, or t
  misc_feature (1373)..(1374): n is a, c, g, or t
tagagagaattactatgagaggatcgcatcaccatcaccatcacggatcctatttaggtgacactatagaatcgtcgacccacgcgtccgccgagcgctactgccagctgatgccgggagctaactaccgcgccggggccggggccggggccggggcccgacgtccccgcggggcccgggaccgcgaggaggacggcgggggcctggagcccgcggccgtggcccgcgacctattgaggggcacatctaacatgtcatttgaggagctgttggaattgcagagccaagtggggactaagacgtacaaacaattggtagctggaaatagtcctaagaaacaagcttctagaccacctatccaaaatgcatgtgttgcagataagcacaggcctctggaaatgtcagccaagatccgagtaccatttttacgtcaggttgttcccattagtaaaaaggtagcccgggaccctcgctttgatgatctgtcaggggaatataatcctgaggtgtttgacaaaacataccaattcttgaatgacatccgagcgaaagagaaagagcttgtgaaaaaacagttgaagaagcacctttcaggagaggagcatgagaaactgcagcaactgcttcagcgaatggagcagcaagaaatggcacagcaggaacgaaagcaacagcaggagctgcacctggccctgaagcaagaacgtcgggctcangcccagcagggccatcggccatacttcctgaaaaaatctgagcagcgccagttggcactagctgaaaagttcaaggagctgaaacgcancaagaaattggaanaacttctttgagtccaaaagangcgacgaaatgcagncaaggacaggagacatctccntttgagcaaanagtaataaaggaactatcctctgctctgcactgccccaagganacatggatntgtgangaaaaattttgcccccggnntggttttcnnttcaagggcaaggaatcnaactgcccttgaaatcccattgcctaaaaaaaaaanaaaaggntttttggaaanttcctanggnttancaaaaaaaanttcnnccnttttgccatgcnnaaaacctncnnnttnaatcnggttnatgnnncccccggnttttcccccanccttgcctnaaacnnggaatttnaaaccnaaaaaaaggnccaagaaaacctggnntttttnnnatnccngggtggnaantnttnanaacccttnnnaaanttttttntnnaaaaaaaaaaaangggncccccccaannggnnatanntttntnnnanntnnccccnnnaaannnaaannccnaaacnntnntttttaanncnntncncngnnttttttnaaaannnnttnnaaa

SEQ ID NO: 188 - DNA, 1374 bp, Homo Sapiens
  misc_feature (1)..(1): n is a, c, g, or t
  misc_feature (810)..(810): n is a, c, g, or t
  misc_feature (843)..(843): n is a, c, g, or t
  misc_feature (865)..(865): n is a, c, g, or t
  misc_feature (868)..(868): n is a, c, g, or t
  misc_feature (873)..(873): n is a, c, g, or t
  misc_feature (891)..(891): n is a, c, g, or t
  misc_feature (915)..(915): n is a, c, g, or t
  misc_feature (926)..(926): n is a, c, g, or t
  misc_feature (932)..(932): n is a, c, g, or t
  misc_feature (934)..(935): n is a, c, g, or t
  misc_feature (941)..(941): n is a, c, g, or t
  misc_feature (945)..(945): n is a, c, g, or t
  misc_feature (947)..(947): n is a, c, g, or t
  misc_feature (956)..(956): n is a, c, g, or t
  misc_feature (960)..(960): n is a, c, g, or t
  misc_feature (966)..(966): n is a, c, g, or t
  misc_feature (970)..(970): n is a, c, g, or t
  misc_feature (979)..(979): n is a, c, g, or t
  misc_feature (986)..(986): n is a, c, g, or t
  misc_feature (993)..(993): n is a, c, g, or t
  misc_feature (1006)..(1006): n is a, c, g, or t
  misc_feature (1008)..(1008): n is a, c, g, or t
  misc_feature (1015)..(1015): n is a, c, g, or t
  misc_feature (1019)..(1020): n is a, c, g, or t
  misc_feature (1023)..(1023): n is a, c, g, or t
  misc_feature (1049)..(1049): n is a, c, g, or t
  misc_feature (1054)..(1055): n is a, c, g, or t
  misc_feature (1068)..(1068): n is a, c, g, or t
  misc_feature (1084)..(1086): n is a, c, g, or t
  misc_feature (1114)..(1115): n is a, c, g, or t
  misc_feature (1123)..(1124): n is a, c, g, or t
  misc_feature (1138)..(1138): n is a, c, g, or t
  misc_feature (1146)..(1146): n is a, c, g, or t
  misc_feature (1153)..(1153): n is a, c, g, or t
  misc_feature (1155)..(1155): n is a, c, g, or t
  misc_feature (1163)..(1164): n is a, c, g, or t
  misc_feature (1187)..(1188): n is a, c, g, or t
  misc_feature (1196)..(1196): n is a, c, g, or t
  misc_feature (1207)..(1207): n is a, c, g, or t
  misc_feature (1216)..(1216): n is a, c, g, or t
  misc_feature (1229)..(1229): n is a, c, g, or t
  misc_feature (1243)..(1244): n is a, c, g, or t
  misc_feature (1253)..(1253): n is a, c, g, or t
  misc_feature (1256)..(1256): n is a, c, g, or t
  misc_feature (1259)..(1259): n is a, c, g, or t
  misc_feature (1263)..(1263): n is a, c, g, or t
  misc_feature (1266)..(1266): n is a, c, g, or t
  misc_feature (1269)..(1269): n is a, c, g, or t
  misc_feature (1275)..(1276): n is a, c, g, or t
  misc_feature (1281)..(1281): n is a, c, g, or t
  misc_feature (1286)..(1289): n is a, c, g, or t
  misc_feature (1302)..(1302): n is a, c, g, or t
  misc_feature (1311)..(1311): n is a, c, g, or t
  misc_feature (1313)..(1313): n is a, c, g, or t
  misc_feature (1316)..(1320): n is a, c, g, or t
  misc_feature (1328)..(1328): n is a, c, g, or t
  misc_feature (1340)..(1340): n is a, c, g, or t
  misc_feature (1348)..(1348): n is a, c, g, or t
  misc_feature (1351)..(1353): n is a, c, g, or t
  misc_feature (1356)..(1356): n is a, c, g, or t
  misc_feature (1358)..(1358): n is a, c, g, or t
  misc_feature (1360)..(1360): n is a, c, g, or t
naattagagaaattactatgagaggatcgcatcaccatcaccatcacggatcctatttaggtgacactatagaatcgtcgacccacgcgtccggctctggtgaacctccaaaatcaggggatcgcagcggctacagcagccccggctccccaggcactcccggcagccgctcccgcaccccgtcccttccaaccccacccacccgggagcccaagaaggtggcagtggtccgtactccacccaagtcgccgtcttccgccaagagccgcctgcagacagcccccgtgcccatgccagacctgaagaatgtcaagtccaagatcggctccactgagaacctgaagcaccagccgggaggcgggaaggtgcaaatagtctacaaaccagttgacctgagcaaggtgacctccaagtgtggctcattaggcaacatccatcataaaccaggaggtggccaggtggaagtaaaatctgagaagcttgacttcaaggacagagtccagtcgaagattgggtccctggacaatatcacccacgtccctggcggaggaaataaaaagattgaaacccacaagctgaccttccgcgagaacgccaaagccaagacagaccacggggcggagatcgtgtacaagtcgccagtggtgtctggggacacgtctccacggcatctcagcaatgtctcctccaccggcagcatcgacatggtagactcgcccccagctcgccacgctagctgacgaggtgtctgcctccctggccaagcagggtttgtgatcaggcccctgggggcggtcaataattgtgganaggaaaaaatgaaaaagtgtggaaaaaaaaaanaataatggaccggggcccccgnccntttgnccccaggttgctcctcgnaattcggttaaattggttaaaccncttaaacctgntttttntnnctcggntttngnctcgggaanttcnaaatcngtgngtggggaanaaaaaanaaatttntttttttccaaantngaagggngggnntantaataaaaaattttttaaaaaaaaanttttnnaaaaaattggccnattccaaaattttccnnngggaaatccctttttaaatttttttttnntccccccnncggtaaaaaaaggnaaaaaaanaaaagtntntaaaattnntttttgggggaattttaaggggnnggggggtnccaaacccccntggggcctnttggggggggttncaaaaagggggggnnaaaaaaaanatnttnaaanttnggntttttnnggganccccnnnnaaaaaatttcccntttttaaantnaannnnntttggggnggggggaacccngggaaaanaannnggntntnaaagaaaaaaaaaa

SEQ ID NO: 189 - DNA, 1346 bp, Homo Sapiens
  misc_feature (734)..(734): n is a, c, g, or t
  misc_feature (849)..(849): n is a, c, g, or t
  misc_feature (869)..(869): n is a, c, g, or t
  misc_feature (909)..(909): n is a, c, g, or t
  misc_feature (920)..(920): n is a, c, g, or t
  misc_feature (934)..(934): n is a, c, g, or t
  misc_feature (937)..(937): n is a, c, g, or t
  misc_feature (957)..(957): n is a, c, g, or t
  misc_feature (964)..(964): n is a, c, g, or t
  misc_feature (982)..(982): n is a, c, g, or t
  misc_feature (990)..(990): n is a, c, g, or t
  misc_feature (996)..(996): n is a, c, g, or t
  misc_feature (1031)..(1031): n is a, c, g, or t
  misc_feature (1042)..(1042): n is a, c, g, or t
  misc_feature (1060)..(1062): n is a, c, g, or t
  misc_feature (1065)..(1065): n is a, c, g, or t
  misc_feature (1075)..(1076): n is a, c, g, or t
  misc_feature (1093)..(1093): n is a, c, g, or t
  misc_feature (1100)..(1100): n is a, c, g, or t
  misc_feature (1116)..(1116): n is a, c, g, or t
  misc_feature (1118)..(1118): n is a, c, g, or t
  misc_feature (1130)..(1130): n is a, c, g, or t
  misc_feature (1132)..(1132): n is a, c, g, or t
  misc_feature (1141)..(1141): n is a, c, g, or t
  misc_feature (1145)..(1145): n is a, c, g, or t
  misc_feature (1149)..(1149): n is a, c, g, or t
  misc_feature (1165)..(1165): n is a, c, g, or t
  misc_feature (1171)..(1171): n is a, c, g, or t
  misc_feature (1173)..(1173): n is a, c, g, or t
  misc_feature (1183)..(1183): n is a, c, g, or t
  misc_feature (1191)..(1191): n is a, c, g, or t
  misc_feature (1194)..(1194): n is a, c, g, or t
  misc_feature (1196)..(1200): n is a, c, g, or t
  misc_feature (1202)..(1202): n is a, c, g, or t
  misc_feature (1211)..(1211): n is a, c, g, or t
  misc_feature (1214)..(1214): n is a, c, g, or t
  misc_feature (1219)..(1220): n is a, c, g, or t
  misc_feature (1224)..(1225): n is a, c, g, or t
  misc_feature (1230)..(1230): n is a, c, g, or t
  misc_feature (1232)..(1232): n is a, c, g, or t
  misc_feature (1237)..(1237): n is a, c, g, or t
  misc_feature (1244)..(1244): n is a, c, g, or t
  misc_feature (1246)..(1247): n is a, c, g, or t
  misc_feature (1253)..(1253): n is a, c, g, or t
  misc_feature (1258)..(1260): n is a, c, g, or t
  misc_feature (1264)..(1265): n is a, c, g, or t
  misc_feature (1288)..(1288): n is a, c, g, or t
  misc_feature (1295)..(1295): n is a, c, g, or t
  misc_feature (1300)..(1303): n is a, c, g, or t
  misc_feature (1306)..(1306): n is a, c, g, or t
  misc_feature (1309)..(1317): n is a, c, g, or t
  misc_feature (1319)..(1320): n is a, c, g, or t
  misc_feature (1324)..(1325): n is a, c, g, or t
  misc_feature (1329)..(1331): n is a, c, g, or t
  misc_feature (1334)..(1334): n is a, c, g, or t
  misc_feature (1336)..(1336): n is a, c, g, or t
  misc_feature (1338)..(1339): n is a, c, g, or t
  misc_feature (1342)..(1344): n is a, c, g, or t
  misc_feature (1346)..(1346): n is a, c, g, or t
attagagagattactatgagaggatcgcatcaccatcaccatcacggatcctatttaggtgacactatagaatcgtcgacccacgcgtccgggaacatgctgaaattcggtgcagcccggaatcccgaggatgtggaccgggagcggcgagaacacgaacgcgaggagaggatggggcagctacgggggtccgcgacccgagccctgccccctggcccacccacgggggccactgccaaccggctccgcagtgccgccgagcccgtggcttccacgccagcctcccgcatccagccggctggcaatacttctcccagagcgatctcgcgggtcgaccgggagaggaaggtgagtatgaggctgcacaggggtgcgcccgccaacgtctcctcctcagacctcactgggcggcaagaggtctcccggatcccagcctcacaggtgagctgcccccctgccagtccctctgggcctcagaactgagttagagaccccccagtgggaggtcaggccgtggctctgttcttccctttccatcgacgctgcttgccttggagtgaaccccttctgttgagccaggacttggcctcatttaatcctctgaggtctgatgagccctcttgagcaaagtcattcaccaaggctcagggcagtaacattccctggcaagtggcacagctgggctccagtcctcgctgccaggggcccagccagggtgggcagcaggggctcanagatgaggtgttgctgctccctgacatcagggagcccccaggagcccctgtgagcattggcaagagcatggggtgtaggggcagtgaggtcccatcctctttggggctatgtttnggatggggacacttgggaanggggaatctgtagttgcccagggcaggtggcctggcaaangtgggtggganccctgccctcgtcntcntgcctgtgggcaagaaggantcctgcnaaaaaaacctcattggcnatctactnaggtancaggtttgcctccttgggcaaatttttaactacanaaagggaaatnttaaaattcctggaatcnnnagncttccctcannttgagggcttcctggangtggggngggggttaaccttccncntgggaaaaattncnaattttttnccanggtnagggaattgattgaanttgaantnctttttttcntccctttnctncnnnnntnaaaaaaaantgnctttnncttnnggaangnaaaancccttgnannggtttntaagnnnccgnnttttttaaaaaaaaaaaaggggnccccccnagggnnnnaanttnnnnnnnnngnnccgnnaaannnaancnannccnnntn

SEQ ID NO: 190 - DNA, 1295 bp, Homo Sapiens
  misc_feature (821)..(821): n is a, c, g, or t
  misc_feature (887)..(887): n is a, c, g, or t
  misc_feature (897)..(897): n is a, c, g, or t
  misc_feature (936)..(936): n is a, c, g, or t
  misc_feature (940)..(940): n is a, c, g, or t
  misc_feature (956)..(956): n is a, c, g, or t
  misc_feature (961)..(961): n is a, c, g, or t
  misc_feature (978)..(978): n is a, c, g, or t
  misc_feature (1004)..(1004): n is a, c, g, or t
  misc_feature (1008)..(1009): n is a, c, g, or t
  misc_feature (1016)..(1016): n is a, c, g, or t
  misc_feature (1027)..(1027): n is a, c, g, or t
  misc_feature (1036)..(1036): n is a, c, g, or t
  misc_feature (1039)..(1039): n is a, c, g, or t
  misc_feature (1043)..(1043): n is a, c, g, or t
  misc_feature (1047)..(1047): n is a, c, g, or t
  misc_feature (1051)..(1051): n is a, c, g, or t
  misc_feature (1054)..(1054): n is a, c, g, or t
  misc_feature (1064)..(1064): n is a, c, g, or t
  misc_feature (1067)..(1067): n is a, c, g, or t
  misc_feature (1077)..(1077): n is a, c, g, or t
  misc_feature (1080)..(1080): n is a, c, g, or t
  misc_feature (1084)..(1084): n is a, c, g, or t
  misc_feature (1092)..(1092): n is a, c, g, or t
  misc_feature (1095)..(1095): n is a, c, g, or t
  misc_feature (1100)..(1101): n is a, c, g, or t
  misc_feature (1108)..(1108): n is a, c, g, or t
  misc_feature (1111)..(1113): n is a, c, g, or t
  misc_feature (1115)..(1115): n is a, c, g, or t
  misc_feature (1119)..(1119): n is a, c, g, or t
  misc_feature (1123)..(1123): n is a, c, g, or t
  misc_feature (1127)..(1127): n is a, c, g, or t
  misc_feature (1132)..(1132): n is a, c, g, or t
  misc_feature (1136)..(1136): n is a, c, g, or t
  misc_feature (1146)..(1146): n is a, c, g, or t
  misc_feature (1151)..(1151): n is a, c, g, or t
  misc_feature (1153)..(1153): n is a, c, g, or t
  misc_feature (1157)..(1157): n is a, c, g, or t
  misc_feature (1165)..(1165): n is a, c, g, or t
  misc_feature (1172)..(1173): n is a, c, g, or t
  misc_feature (1178)..(1178): n is a, c, g, or t
  misc_feature (1180)..(1180): n is a, c, g, or t
  misc_feature (1183)..(1183): n is a, c, g, or t
  misc_feature (1188)..(1188): n is a, c, g, or t
  misc_feature (1195)..(1195): n is a, c, g, or t
  misc_feature (1200)..(1200): n is a, c, g, or t
  misc_feature (1215)..(1216): n is a, c, g, or t
  misc_feature (1220)..(1220): n is a, c, g, or t
  misc_feature (1222)..(1222): n is a, c, g, or t
  misc_feature (1234)..(1234): n is a, c, g, or t
  misc_feature (1239)..(1239): n is a, c, g, or t
  misc_feature (1253)..(1254): n is a, c, g, or t
  misc_feature (1259)..(1260): n is a, c, g, or t
  misc_feature (1265)..(1265): n is a, c, g, or t
  misc_feature (1273)..(1273): n is a, c, g, or t
  misc_feature (1282)..(1284): n is a, c, g, or t
tagagaaattactatgagaggatcgcatcaccatcaccatcacggatcctatttaggtgacactatagaatcgtcgacccacgcgtccgggcgactctgctgcgccctgtcctccgtcggctctgcgggctcccgggcctacagcggcctgcggcagaaatgcccctccgggctaggagcgacggcgccggcccgctatactcgcaccacctccccacctccccgctgcagaaagcgctgttggccgccggctccgcggcgatggcgctctataacccctaccgccacgacatggtcgcagttctaggggagaccacaggacaccgcaccctgaaggtcctcagggaccagatgaggagggatccagagggtgcccagatcctgcaggagcgtccccggatttcgacatccaccctcgacctgggcaagctccagagcctgccggaaggctccctcggtcgcgagtatctccgtttcctggatgtgaacagggtctccccagacacccgagcacccacccgcttcgtggatgatgaggagctagcgtatgtgattcagcggtaccgggaggtgcacgacatgcttcacaccctgctggggatgcccaccaacatcctgggggagatcgtggtgaaatggtttgaggctgtccagactggcctgcccatgtgcatcctgggtgcattctttggaccgatccgacttggcgctcagagcctgcaagtgctggtctcggagttgatcccatgggccgttcagaacgggcgcaaagccccatgtgtcctcaacctgtactatgagcggcgctgggagcagtcccntgagggctctgcgggaggagctgggcattacagcaccacccatgcacgtccagggcttggcctganctcctgagcnagcggggcctggcctacctcccccatcccctggtttccnttgnaggaaaagggctcccnttgantacctttgttcctcttntttgaaaactgaaccctttggaaaanattnntcataantttgtcataanccactgctnaantggncttngaanaanaaaacccccncangggaacaaancantaanagtgggcnttncccannggggaancannnancttncccnaggnaaaancctngcttgaaaantattnanttcntttggggntttttgnntgggnanttnccaantgttttnttttnaaattttcttccaannaacnangttttttggggnccaanttgggttttctccnnggaanngaggnttaacccnatttcaaannntgaaaaaaaaa

SEQ ID NO: 191 - DNA, 1047 bp, Homo Sapiens
gaattaactatgagaggtcgcatcaccatcaccatcacggatcctatttaggtgacactatagaatcgtcgacccacgcgtccgcccacgcgtccgcggacgcgtgggcccttgccaaagaccagttggccatcgcggcctcccgacacggtcgcacgtatcatgcgtacccagactttgccccccagaagttcaaagagaaaacacagggtcaggttaaaatcttggaagacagctttttgaaaagttcttttcctacccaagcagaactggatcggctaagggtggagaccaagctgagcaggagagagatcgactcctggttctcggagaggcggaagcttcgagacagcatggaacaagctgtcttggattccatggggtctggcaaaaaaggccaagatgtgggagcccccaatggtgctctgtctcgactcgaccagctttccggtgcccagttaacaagttctctgcccagcccttcgccagcaattgcaaaaagtcaagaacaggttcatctcctgaggagcacgtttgcaagaacccagtggcctactccccaggagtacgaccagttagcggccaagactggcctggtccgaactgagattgtgcgttggttcaaggagaacagatgcttgctgaaaacgggaaccgtgaagtggatggagcagtaccagcaccagcccatggcagatgatcacggctacgatgccgtagcaaggaaagcaacaaaacccatggccgagagcccaaagaacgggggtgatgtggttccacaatattacaaggaccccaaaaagctctgcgaagaggacttggagaagttggtgaccagggtaaaagtaggcagcgagccagcaaaagactgtttgccagcaaagccctcagaggccacctcagaccggtcagagggcagcagccgggacggccagggtagcgacgagaacgaggagtcgagcgttgtggattacgtggaggtgacggtcggggaggaggatgccatctcagatagatcagatagctggagtcaggctgcggcagaat

SEQ ID NO: 192 - DNA, 1354 bp, Homo Sapiens
  misc_feature (909)..(909): n is a, c, g, or t
  misc_feature (949)..(949): n is a, c, g, or t
  misc_feature (952)..(952): n is a, c, g, or t
  misc_feature (961)..(961): n is a, c, g, or t
  misc_feature (991)..(991): n is a, c, g, or t
  misc_feature (1006)..(1006): n is a, c, g, or t
  misc_feature (1013)..(1013): n is a, c, g, or t
  misc_feature (1016)..(1016): n is a, c, g, or t
  misc_feature (1018)..(1018): n is a, c, g, or t
  misc_feature (1021)..(1021): n is a, c, g, or t
  misc_feature (1028)..(1028): n is a, c, g, or t
  misc_feature (1037)..(1037): n is a, c, g, or t
  misc_feature (1048)..(1049): n is a, c, g, or t
  misc_feature (1055)..(1055): n is a, c, g, or t
  misc_feature (1057)..(1057): n is a, c, g, or t
  misc_feature (1061)..(1061): n is a, c, g, or t
  misc_feature (1069)..(1069): n is a, c, g, or t
  misc_feature (1080)..(1080): n is a, c, g, or t
  misc_feature (1083)..(1083): n is a, c, g, or t
  misc_feature (1089)..(1089): n is a, c, g, or t
  misc_feature (1100)..(1100): n is a, c, g, or t
  misc_feature (1102)..(1102): n is a, c, g, or t
  misc_feature (1109)..(1109): n is a, c, g, or t
  misc_feature (1113)..(1113): n is a, c, g, or t
  misc_feature (1115)..(1115): n is a, c, g, or t
  misc_feature (1118)..(1119): n is a, c, g, or t
  misc_feature (1124)..(1124): n is a, c, g, or t
  misc_feature (1128)..(1128): n is a, c, g, or t
  misc_feature (1130)..(1130): n is a, c, g, or t
  misc_feature (1135)..(1135): n is a, c, g, or t
  misc_feature (1138)..(1139): n is a, c, g, or t
  misc_feature (1144)..(1144): n is a, c, g, or t
  misc_feature (1156)..(1156): n is a, c, g, or t
  misc_feature (1160)..(1160): n is a, c, g, or t
  misc_feature (1164)..(1164): n is a, c, g, or t
  misc_feature (1168)..(1169): n is a, c, g, or t
  misc_feature (1173)..(1174): n is a, c, g, or t
  misc_feature (1182)..(1182): n is a, c, g, or t
  misc_feature (1187)..(1187): n is a, c, g, or t
  misc_feature (1189)..(1190): n is a, c, g, or t
  misc_feature (1194)..(1195): n is a, c, g, or t
  misc_feature (1199)..(1199): n is a, c, g, or t
  misc_feature (1201)..(1202): n is a, c, g, or t
  misc_feature (1204)..(1204): n is a, c, g, or t
  misc_feature (1210)..(1210): n is a, c, g, or t
  misc_feature (1213)..(1213): n is a, c, g, or t
  misc_feature (1218)..(1219): n is a, c, g, or t
  misc_feature (1221)..(1221): n is a, c, g, or t
  misc_feature (1223)..(1223): n is a, c, g, or t
  misc_feature (1227)..(1227): n is a, c, g, or t
  misc_feature (1237)..(1237): n is a, c, g, or t
  misc_feature (1243)..(1244): n is a, c, g, or t
  misc_feature (1246)..(1249): n is a, c, g, or t
  misc_feature (1252)..(1252): n is a, c, g, or t
  misc_feature (1257)..(1257): n is a, c, g, or t
  misc_feature (1265)..(1266): n is a, c, g, or t
  misc_feature (1270)..(1270): n is a, c, g, or t
  misc_feature (1276)..(1276): n is a, c, g, or t
  misc_feature (1283)..(1283): n is a, c, g, or t
  misc_feature (1286)..(1286): n is a, c, g, or t
  misc_feature (1289)..(1289): n is a, c, g, or t
  misc_feature (1291)..(1291): n is a, c, g, or t
  misc_feature (1296)..(1297): n is a, c, g, or t
  misc_feature (1300)..(1301): n is a, c, g, or t
  misc_feature (1305)..(1305): n is a, c, g, or t
  misc_feature (1313)..(1313): n is a, c, g, or t
  misc_feature (1315)..(1318): n is a, c, g, or t
  misc_feature (1320)..(1320): n is a, c, g, or t
  misc_feature (1322)..(1323): n is a, c, g, or t
  misc_feature (1328)..(1329): n is a, c, g, or t
  misc_feature (1335)..(1341): n is a, c, g, or t
  misc_feature (1354)..(1354): n is a, c, g, or t
tagagaaattactatgagaggatcgcatcaccatcaccatcacggatcctatttaggtgacactatagaatcgtcgacccacgcgtccgccaggacgcacgggcatggggaccccggggagccagatggcccccgtgagcctgaatgtgccccgacccaaccaggtgagcgggcccgtcatgcccagcatgcctcccgggcagtggcagcaggcgccccttccccagcagcagcccatgccaggcttgcccaggcctgtgatatccatgcaggcccaggcggccgtggctgggccccggatgcccagcgtgcagccacccaggagcatctcacccagcgctctgcaagacctgctgcggaccctgaagtcgcccagctcccctcagcagcaacagcaggtgctgaacattctcaaatcaaacccgcagctaatggcagctttcatcaaacagcgcacagccaagtacgtggccaatcagcccggcatgcagccccagcctggcctccagtcccagcccggcatgcaaccccagcctggcatgcaccagcagcccagcctgcagaacctgaatgccatgcaggctggcgtgccgcggcccggtgtgcctccacagcagcaggcgatgggaggcctgaacccccagggccaggccttgaacatcatgaacccaggacacaaccccaacatggcgagtatgaatccacagtaccgagaaatgttacggaggcagctgctgcagcagcagcagcaacagcagcagcaacaacagcagcaacagcagcagcagcaagggagtgccggcatggctgggggcatggcggggcacggccagttccagcagcctcaaggacccggaagctacccaccggccatgcagcagcagcagcgcatgcagcagcatctccccntccagggcagctccatgggccagatggcggctcaaatggnaancttggccanatggggcaacccggggctgggggcaaaaancacccccaaatccancaagccntgnancancggattntgcagcaanagcaaatgaannaccaantnggtncccaggcnagccaaacccnganccccanaaaaaatgttntnaagaaancaangnctnnattcntggnanaaatnccnntcttnaaaaaagggggnttcnaccntttnntttnngggccatncaacntnnattnnccgntnnangaaaanccnctttnnanantttnccaaaggttncccccnnannnntcnggggnttttatannaatnggaacnaaaaaangtnccntnaaccnnaanntttnaatttttngnnnngnannaaaanngggggnnnnnnnttttttttttttn

SEQ ID NO: 193 - DNA, 1456 bp, Homo Sapiens
  misc_feature (724)..(724): n is a, c, g, or t
  misc_feature (769)..(769): n is a, c, g, or t
  misc_feature (829)..(829): n is a, c, g, or t
  misc_feature (850)..(850): n is a, c, g, or t
  misc_feature (853)..(853): n is a, c, g, or t
  misc_feature (922)..(922): n is a, c, g, or t
  misc_feature (943)..(943): n is a, c, g, or t
  misc_feature (962)..(962): n is a, c, g, or t
  misc_feature (975)..(975): n is a, c, g, or t
  misc_feature (979)..(979): n is a, c, g, or t
  misc_feature (984)..(984): n is a, c, g, or t
  misc_feature (997)..(997): n is a, c, g, or t
  misc_feature (1007)..(1007): n is a, c, g, or t
  misc_feature (1013)..(1014): n is a, c, g, or t
  misc_feature (1025)..(1026): n is a, c, g, or t
  misc_feature (1028)..(1028): n is a, c, g, or t
  misc_feature (1030)..(1031): n is a, c, g, or t
  misc_feature (1034)..(1034): n is a, c, g, or t
  misc_feature (1041)..(1042): n is a, c, g, or t
  misc_feature (1048)..(1048): n is a, c, g, or t
  misc_feature (1056)..(1056): n is a, c, g, or t
  misc_feature (1060)..(1060): n is a, c, g, or t
  misc_feature (1074)..(1074): n is a, c, g, or t
  misc_feature (1076)..(1076): n is a, c, g, or t
  misc_feature (1080)..(1080): n is a, c, g, or t
  misc_feature (1082)..(1082): n is a, c, g, or t
  misc_feature (1084)..(1084): n is a, c, g, or t
  misc_feature (1095)..(1095): n is a, c, g, or t
  misc_feature (1099)..(1099): n is a, c, g, or t
  misc_feature (1102)..(1102): n is a, c, g, or t
  misc_feature (1112)..(1112): n is a, c, g, or t
  misc_feature (1120)..(1120): n is a, c, g, or t
  misc_feature (1122)..(1122): n is a, c, g, or t
  misc_feature (1133)..(1133): n is a, c, g, or t
  misc_feature (1139)..(1139): n is a, c, g, or t
  misc_feature (1143)..(1143): n is a, c, g, or t
  misc_feature (1158)..(1158): n is a, c, g, or t
  misc_feature (1163)..(1163): n is a, c, g, or t
  misc_feature (1171)..(1171): n is a, c, g, or t
  misc_feature (1174)..(1174): n is a, c, g, or t
  misc_feature (1178)..(1178): n is a, c, g, or t
  misc_feature (1184)..(1184): n is a, c, g, or t
  misc_feature (1188)..(1189): n is a, c, g, or t
  misc_feature (1191)..(1191): n is a, c, g, or t
  misc_feature (1206)..(1206): n is a, c, g, or t
  misc_feature (1208)..(1208): n is a, c, g, or t
  misc_feature (1216)..(1216): n is a, c, g, or t
  misc_feature (1239)..(1240): n is a, c, g, or t
  misc_feature (1247)..(1247): n is a, c, g, or t
  misc_feature (1252)..(1252): n is a, c, g, or t
  misc_feature (1254)..(1256): n is a, c, g, or t
  misc_feature (1260)..(1260): n is a, c, g, or t
  misc_feature (1262)..(1264): n is a, c, g, or t
  misc_feature (1267)..(1267): n is a, c, g, or t
  misc_feature (1273)..(1273): n is a, c, g, or t
  misc_feature (1278)..(1278): n is a, c, g, or t
  misc_feature (1280)..(1280): n is a, c, g, or t
  misc_feature (1285)..(1285): n is a, c, g, or t
  misc_feature (1295)..(1295): n is a, c, g, or t
  misc_feature (1303)..(1303): n is a, c, g, or t
  misc_feature (1305)..(1306): n is a, c, g, or t
  misc_feature (1309)..(1309): n is a, c, g, or t
  misc_feature (1323)..(1323): n is a, c, g, or t
  misc_feature (1325)..(1326): n is a, c, g, or t
  misc_feature (1333)..(1334): n is a, c, g, or t
  misc_feature (1338)..(1338): n is a, c, g, or t
  misc_feature (1346)..(1346): n is a, c, g, or t
  misc_feature (1348)..(1348): n is a, c, g, or t
  misc_feature (1352)..(1352): n is a, c, g, or t
  misc_feature (1354)..(1354): n is a, c, g, or t
  misc_feature (1359)..(1359): n is a, c, g, or t
  misc_feature (1362)..(1362): n is a, c, g, or t
  misc_feature (1364)..(1364): n is a, c, g, or t
  misc_feature (1368)..(1369): n is a, c, g, or t
  misc_feature (1371)..(1371): n is a, c, g, or t
  misc_feature (1378)..(1378): n is a, c, g, or t
  misc_feature (1380)..(1381): n is a, c, g, or t
  misc_feature (1383)..(1383): n is a, c, g, or t
  misc_feature (1386)..(1386): n is a, c, g, or t
  misc_feature (1388)..(1388): n is a, c, g, or t
  misc_feature (1390)..(1390): n is a, c, g, or t
  misc_feature (1393)..(1393): n is a, c, g, or t
  misc_feature (1396)..(1397): n is a, c, g, or t
  misc_feature (1399)..(1399): n is a, c, g, or t
  misc_feature (1401)..(1401): n is a, c, g, or t
  misc_feature (1404)..(1404): n is a, c, g, or t
  misc_feature (1407)..(1407): n is a, c, g, or t
  misc_feature (1422)..(1422): n is a, c, g, or t
  misc_feature (1425)..(1425): n is a, c, g, or t
  misc_feature (1433)..(1433): n is a, c, g, or t
  misc_feature (1435)..(1435): n is a, c, g, or t
  misc_feature (1440)..(1441): n is a, c, g, or t
  misc_feature (1445)..(1445): n is a, c, g, or t
gatagagaaattactatgagaggatcgcatcaccatcaccatcacggatcctatttaggtgacactatagaatcgtcgacccacgcgtccggcacggattgctcatccgatccgtgccgccgcagggagtgtgtcaagttacagaggcgccggaatcggcccctgcgctcctcgccagccgccacgacccacctctgcccatggggccctccatgtgcgccccttcgcccggggactgaaactgactggcccgggagacacgaggcgcccagaaggactgacagcgcggcaccaactgctctgcagacacttgaagggaaagactgggcggagagaaggagagccggtcagattcccctaactttcctggacttggaacgttcttcgaaataacttttttctcacctaggtgtaccccaattaccgctggttgtgctttttcggcacttcctctcctactgctaatttttccgtcctctttgccgggagcagcggaaagggacgttttccagcgatacaagccctttccccctgccccgcagtttggatagagccttttggcagcggctgtcgcctttatttattctatttatttatttattggttctcaagacgcgagaggatggtagcggagcgcacccacaaagcggcagccaccggtgcccgcggccctggggagttgggcgcgcccgggacggtggctctggtggcggcgcgggcggancgcggcgcacggctgccgagtccagggtcgtgcgggctgctgacnctggccctctgctcgctggcactcagcctgctcgcccactttcggacggccgagctgcangcccggggtgctgcgccctgnaancggaacgcgggggagcaacaaaatggaagacgggctattttgggaacgaattcaatcaactgctggacnaaaaaatgaaaactccacttnaaggaaggcgccgggaagnccaaaagaacatntccnagaantaaatgccccacnaggaccttcntggaannaaagggccaannangnnaanaaagggnnccccgnaaaacctngggntgtccatccattgntncccncngncccccctggtnaacnaanaaataaaagntttccctngnaatttccggtnccattngggnggaaaggcaaacccnggccnccaaaacnaangggnaaatgngtcnnanggttccccaaaaaancnggaacccngaaaaaaaaaaaaaagggttttnngtaaaanacccntnnngttnannnttncctcanataananagggntctcccccgnctaaaaangnnaanttaggaaaaaaaangnnaatttannttcnagagctcncncccntnaaaantantngggnncnaaatgangnntngtncncnttnttnntncnctnaanaaaaaaattttctcnccnaaaaaaantnatatnntaanataagtcttta

SEQ ID NO: 194 - DNA, 1200 bp, Homo Sapiens
  misc_feature (766)..(766): n is a, c, g, or t
  misc_feature (788)..(788): n is a, c, g, or t
  misc_feature (814)..(814): n is a, c, g, or t
  misc_feature (824)..(824): n is a, c, g, or t
  misc_feature (831)..(831): n is a, c, g, or t
  misc_feature (838)..(838): n is a, c, g, or t
  misc_feature (849)..(849): n is a, c, g, or t
  misc_feature (869)..(869): n is a, c, g, or t
  misc_feature (888)..(888): n is a, c, g, or t
  misc_feature (890)..(890): n is a, c, g, or t
  misc_feature (924)..(924): n is a, c, g, or t
  misc_feature (929)..(929): n is a, c, g, or t
  misc_feature (963)..(963): n is a, c, g, or t
  misc_feature (968)..(968): n is a, c, g, or t
  misc_feature (976)..(976): n is a, c, g, or t
  misc_feature (978)..(978): n is a, c, g, or t
  misc_feature (1001)..(1001): n is a, c, g, or t
  misc_feature (1008)..(1008): n is a, c, g, or t
  misc_feature (1014)..(1015): n is a, c, g, or t
  misc_feature (1028)..(1028): n is a, c, g, or t
  misc_feature (1039)..(1039): n is a, c, g, or t
  misc_feature (1045)..(1045): n is a, c, g, or t
  misc_feature (1049)..(1050): n is a, c, g, or t
  misc_feature (1057)..(1058): n is a, c, g, or t
  misc_feature (1060)..(1060): n is a, c, g, or t
  misc_feature (1084)..(1084): n is a, c, g, or t
  misc_feature (1094)..(1095): n is a, c, g, or t
  misc_feature (1100)..(1100): n is a, c, g, or t
  misc_feature (1109)..(1109): n is a, c, g, or t
  misc_feature (1111)..(1112): n is a, c, g, or t
  misc_feature (1114)..(1114): n is a, c, g, or t
  misc_feature (1116)..(1116): n is a, c, g, or t
  misc_feature (1126)..(1126): n is a, c, g, or t
  misc_feature (1156)..(1156): n is a, c, g, or t
  misc_feature (1171)..(1172): n is a, c, g, or t
  misc_feature (1175)..(1176): n is a, c, g, or t
  misc_feature (1185)..(1187): n is a, c, g, or t
  misc_feature (1192)..(1193): n is a, c, g, or t
  misc_feature (1198)..(1198): n is a, c, g, or t
atagagagattactatgagaggatcgcatcaccatcaccatcacggatcctatttaggtgacactatagaatcgtcgacccacgcgtccgcccacctttgcagatatctgcacctcaggagagactgtattccacgtggattgggggctccatccttgcctccctggacacctttaagaagatgtgggtctccaaaaaggaatatgaggaagacggtgcccgatccatccacagaaaaaccttctaatgtcgggacatcatcttcacctctctctgaagttaactccactttaaaactcgctttcttgagtcggagtgtttgcgaggaactgcctgtgtgtgagtgcgtgtgtggatatgagtgtgtgtgcacatgcgagtgccgtgtggccctgggaccctgggcccagaaaggacgatgaactacctgcagtggtgatggcctgaggcctggggttgaccactaactggctcctgacagggaagagcgctggcagaggctgtgctccctcctcaggtggcctctggctggctgtgggggactccgtttactaccacagggagacagagggaggtaagccatcccccgggagaccttgctgctgaccatcctaggctgggctggccccaccctcacccccacccccagggtgccctgaggccccaggcagctgctgcctccactatcgatgcctcctgactgcacactgaggactgggactggggttgagttctgtctggttttgttgccattttggtttgggangctggaaaagcacccccaaganctattacagagactggaagtcagganaaagcaggangccctcnttgttcnccaaggaacangaccacaccggcccactggnaggagggcaggaaacaatncntccctctgaatggctgcaaaattaatgttcccancccantcccctttcgggggccttgggaaaatttaaagcncctgntgtttccngnaacctccctttcatctgttcttnttgcaangccatnnttaaaccgttttnttttattgaanggtttnttcnnttagggnntngaaaaaaagaaacttggctgcccncccgcccttnntaccnaaaggtttnanncncnaaacttaacnccccggggccccccctcccccccttaaggnaactaaaatcccctnnaanngaaaaaacnnnatttnnaagtncc

SEQ ID NO: 195 - DNA, 990 bp, Homo Sapiens
  misc_feature (793)..(793): n is a, c, g, or t
  misc_feature (801)..(801): n is a, c, g, or t
  misc_feature (804)..(804): n is a, c, g, or t
  misc_feature (823)..(823): n is a, c, g, or t
  misc_feature (836)..(836): n is a, c, g, or t
  misc_feature (843)..(843): n is a, c, g, or t
  misc_feature (857)..(857): n is a, c, g, or t
  misc_feature (865)..(865): n is a, c, g, or t
  misc_feature (867)..(867): n is a, c, g, or t
  misc_feature (869)..(869): n is a, c, g, or t
  misc_feature (872)..(872): n is a, c, g, or t
  misc_feature (877)..(877): n is a, c, g, or t
  misc_feature (882)..(882): n is a, c, g, or t
  misc_feature (887)..(887): n is a, c, g, or t
  misc_feature (894)..(894): n is a, c, g, or t
  misc_feature (910)..(911): n is a, c, g, or t
  misc_feature (915)..(915): n is a, c, g, or t
  misc_feature (925)..(925): n is a, c, g, or t
  misc_feature (930)..(930): n is a, c, g, or t
  misc_feature (939)..(939): n is a, c, g, or t
  misc_feature (941)..(941): n is a, c, g, or t
  misc_feature (946)..(947): n is a, c, g, or t
  misc_feature (952)..(952): n is a, c, g, or t
  misc_feature (958)..(958): n is a, c, g, or t
  misc_feature (965)..(966): n is a, c, g, or t
  misc_feature (975)..(975): n is a, c, g, or t
  misc_feature (978)..(978): n is a, c, g, or t
  misc_feature (981)..(981): n is a, c, g, or t
tgagaaattactatgagaggatcgcatcaccatcaccatcacggatcctatttaggtgacactatagaatcgtcgacccacgcgtccgccggagcccttgagcgcgaggcgcggagcccccggagcccccaaaccgcagacacatccccgcgccccagagccccggcctgcgcgcccagccgggcccgcgcgatgccctcagaccggcctttcaagcagcggcggagcttcgccgaccgctgtaaggaggtacagcagatccgcgaccagcaccccagcaaaatcccggtgatcatcgagcgctacaagggtgagaagcagctgcccgtcctggacaagaccaagtttttggtcccggaccatgtcaacatgagcgagttggtcaagatcatccggcgccgcctgcagctgaaccccacgcaggccttcttcctgctggtgaaccagcacagcatggtgagtgtgtccacgcccatcgcggacatctacgagcaggagaaagacgaggacggcttcctctatatggtctacgcctcccaggaaaccttcggcttctgagccagcagtaggggggctcggcctgggagtcggggggccccggtcaggccctgcccagagagctcctggttcctgaactgagctgcctctaccgtggtgggctgggcaggcatgtgcccccctagtcagagggcaccaacccacctactctgcccctgggtggatcctgggccggtcgtgttagggttgtccctctggggtgctggctggtgggatgggggagggtggggagcancttcccancanccctgctgtgtggttcatntttttttttaagncccctgnctgtctgcccaatntgcccccntnanccnacccnaaggntttgncaaccgncttggaatctggcccnncccntgaaaaaaantgggncccttgggntnccccnnccccnttgggnttttccnngtggggggnaanggnatttggggg

SEQ ID NO: 196 - DNA, 1200 bp, Homo Sapiens
  misc_feature (708)..(708): n is a, c, g, or t
  misc_feature (737)..(737): n is a, c, g, or t
  misc_feature (739)..(739): n is a, c, g, or t
  misc_feature (744)..(744): n is a, c, g, or t
  misc_feature (747)..(747): n is a, c, g, or t
  misc_feature (755)..(755): n is a, c, g, or t
  misc_feature (761)..(761): n is a, c, g, or t
  misc_feature (768)..(768): n is a, c, g, or t
  misc_feature (794)..(794): n is a, c, g, or t
  misc_feature (803)..(803): n is a, c, g, or t
  misc_feature (824)..(824): n is a, c, g, or t
  misc_feature (827)..(827): n is a, c, g, or t
  misc_feature (831)..(831): n is a, c, g, or t
  misc_feature (834)..(834): n is a, c, g, or t
  misc_feature (839)..(839): n is a, c, g, or t
  misc_feature (866)..(867): n is a, c, g, or t
  misc_feature (873)..(873): n is a, c, g, or t
  misc_feature (885)..(885): n is a, c, g, or t
  misc_feature (897)..(897): n is a, c, g, or t
  misc_feature (904)..(904): n is a, c, g, or t
  misc_feature (906)..(906): n is a, c, g, or t
  misc_feature (911)..(911): n is a, c, g, or t
  misc_feature (918)..(918): n is a, c, g, or t
  misc_feature (930)..(930): n is a, c, g, or t
  misc_feature (935)..(935): n is a, c, g, or t
  misc_feature (944)..(944): n is a, c, g, or t
  misc_feature (948)..(948): n is a, c, g, or t
  misc_feature (954)..(954): n is a, c, g, or t
  misc_feature (958)..(958): n is a, c, g, or t
  misc_feature (973)..(973): n is a, c, g, or t
  misc_feature (979)..(979): n is a, c, g, or t
  misc_feature (987)..(987): n is a, c, g, or t
  misc_feature (989)..(989): n is a, c, g, or t
  misc_feature (992)..(992): n is a, c, g, or t
  misc_feature (1014)..(1014): n is a, c, g, or t
  misc_feature (1018)..(1018): n is a, c, g, or t
  misc_feature (1030)..(1030): n is a, c, g, or t
  misc_feature (1037)..(1038): n is a, c, g, or t
  misc_feature (1042)..(1044): n is a, c, g, or t
  misc_feature (1053)..(1053): n is a, c, g, or t
  misc_feature (1065)..(1066): n is a, c, g, or t
  misc_feature (1069)..(1069): n is a, c, g, or t
  misc_feature (1073)..(1073): n is a, c, g, or t
  misc_feature (1075)..(1075): n is a, c, g, or t
  misc_feature (1080)..(1080): n is a, c, g, or t
  misc_feature (1082)..(1082): n is a, c, g, or t
  misc_feature (1087)..(1087): n is a, c, g, or t
  misc_feature (1096)..(1096): n is a, c, g, or t
  misc_feature (1103)..(1103): n is a, c, g, or t
  misc_feature (1106)..(1106): n is a, c, g, or t
  misc_feature (1116)..(1118): n is a, c, g, or t
  misc_feature (1121)..(1122): n is a, c, g, or t
  misc_feature (1125)..(1125): n is a, c, g, or t
  misc_feature (1131)..(1133): n is a, c, g, or t
  misc_feature (1135)..(1137): n is a, c, g, or t
  misc_feature (1141)..(1141): n is a, c, g, or t
  misc_feature (1147)..(1147): n is a, c, g, or t
  misc_feature (1153)..(1154): n is a, c, g, or t
  misc_feature (1156)..(1156): n is a, c, g, or t
  misc_feature (1158)..(1159): n is a, c, g, or t
  misc_feature (1162)..(1162): n is a, c, g, or t
  misc_feature (1170)..(1170): n is a, c, g, or t
  misc_feature (1172)..(1172): n is a, c, g, or t
  misc_feature (1188)..(1189): n is a, c, g, or t
  misc_feature (1191)..(1191): n is a, c, g, or t
tagagagattactatgagaggatcgcatcaccatcaccatcacggatcctatttaggtgacactatagaatcgtcgacccacgcgtccgcccacgcgatccgcccacgcgtccgcatctggttgcctggcagccttgtcctgctcccagctgcctgtggccccactggactcagccccccagcagggaggccttcggctgcagggcaggggctgggcgggcgcaccctgtggctgggggcactcaggagccctggcttcacctctgctctcggcgcacatgtggacagctcacccttcagcaggggtccggaccaaagtccttgacccaccgggttctgagtcctgacagggctgtggacagcttccctttccaccccggcacgtgctggcaggagcttccgggccctcaccctggggcagcaactcctgcaccaccagccacgcccggccacgagaaagtgcagaacagctcaggcccttctcacaacttcctggagctcagggacaggtagcatctgggtctgggtccaaggtggtgaatgtcaccaccacatctgccctctctcggcctcggggcgcaaactcagggcctgtgtccactctgttcagttttttgagcacaaatggtgttaggtgacaaaactcgggattggccttggacactcagccccctctttctggagcaaaagactcatgacccacgtccnaagtcaccctgcaaatccctaagcctgancntgaancanccctcaanggatgncccaaanactccctgtccgcaccaaccaggcanccgaggcangtttgggaccaactttctcanaantcanaantttcntaaaggtttgcccccaaagcccttganntgcatnaacccctgcaanttataaacctcntaacctntngaaangaatggnaaggggttgaanccacnaaggaaaanttgngaaaanaatnaattggaaaaaactntccaanaaaagaangnttncaaaccccaatatctaaaaaangaanccacccccccanaggggtnnctgnnnaaaggcttnccggaaaaaaannacntttnanggacntnccttnccccaaaancaaaaangtnccaggatttnnnaannttnaagaannncnnncacnggtttnaaaatnncnanncantccctttntnaaaaaaaaaaattttnnanaagaaaata

SEQ ID NO: 197 - DNA, 1400 bp, Homo Sapiens
  misc_feature (748)..(748): n is a, c, g, or t
  misc_feature (762)..(762): n is a, c, g, or t
  misc_feature (769)..(769): n is a, c, g, or t
  misc_feature (777)..(777): n is a, c, g, or t
  misc_feature (845)..(845): n is a, c, g, or t
  misc_feature (856)..(856): n is a, c, g, or t
  misc_feature (870)..(870): n is a, c, g, or t
  misc_feature (890)..(890): n is a, c, g, or t
  misc_feature (903)..(903): n is a, c, g, or t
  misc_feature (929)..(929): n is a, c, g, or t
  misc_feature (969)..(969): n is a, c, g, or t
  misc_feature (983)..(983): n is a, c, g, or t
  misc_feature (985)..(985): n is a, c, g, or t
  misc_feature (987)..(987): n is a, c, g, or t
  misc_feature (1011)..(1011): n is a, c, g, or t
  misc_feature (1027)..(1027): n is a, c, g, or t
  misc_feature (1042)..(1042): n is a, c, g, or t
  misc_feature (1050)..(1051): n is a, c, g, or t
  misc_feature (1064)..(1064): n is a, c, g, or t
  misc_feature (1077)..(1078): n is a, c, g, or t
  misc_feature (1084)..(1084): n is a, c, g, or t
  misc_feature (1088)..(1088): n is a, c, g, or t
  misc_feature (1092)..(1092): n is a, c, g, or t
  misc_feature (1097)..(1097): n is a, c, g, or t
  misc_feature (1112)..(1112): n is a, c, g, or t
  misc_feature (1116)..(1116): n is a, c, g, or t
  misc_feature (1120)..(1121): n is a, c, g, or t
  misc_feature (1136)..(1136): n is a, c, g, or t
  misc_feature (1151)..(1151): n is a, c, g, or t
  misc_feature (1155)..(1155): n is a, c, g, or t
  misc_feature (1171)..(1172): n is a, c, g, or t
  misc_feature (1177)..(1177): n is a, c, g, or t
  misc_feature (1182)..(1183): n is a, c, g, or t
  misc_feature (1190)..(1192): n is a, c, g, or t
  misc_feature (1194)..(1194): n is a, c, g, or t
  misc_feature (1200)..(1201): n is a, c, g, or t
  misc_feature (1205)..(1205): n is a, c, g, or t
  misc_feature (1207)..(1208): n is a, c, g, or t
  misc_feature (1211)..(1211): n is a, c, g, or t
  misc_feature (1213)..(1213): n is a, c, g, or t
  misc_feature (1225)..(1225): n is a, c, g, or t
  misc_feature (1227)..(1227): n is a, c, g, or t
  misc_feature (1231)..(1231): n is a, c, g, or t
  misc_feature (1236)..(1236): n is a, c, g, or t
  misc_feature (1239)..(1239): n is a, c, g, or t
  misc_feature (1251)..(1251): n is a, c, g, or t
  misc_feature (1271)..(1272): n is a, c, g, or t
  misc_feature (1274)..(1277): n is a, c, g, or t
  misc_feature (1289)..(1290): n is a, c, g, or t
  misc_feature (1292)..(1292): n is a, c, g, or t
  misc_feature (1299)..(1299): n is a, c, g, or t
  misc_feature (1302)..(1302): n is a, c, g, or t
  misc_feature (1306)..(1306): n is a, c, g, or t
  misc_feature (1311)..(1311): n is a, c, g, or t
  misc_feature (1316)..(1322): n is a, c, g, or t
  misc_feature (1328)..(1328): n is a, c, g, or t
  misc_feature (1330)..(1330): n is a, c, g, or t
  misc_feature (1332)..(1335): n is a, c, g, or t
  misc_feature (1341)..(1344): n is a, c, g, or t
  misc_feature (1348)..(1348): n is a, c, g, or t
  misc_feature (1355)..(1356): n is a, c, g, or t
  misc_feature (1358)..(1358): n is a, c, g, or t
  misc_feature (1360)..(1361): n is a, c, g, or t
  misc_feature (1364)..(1364): n is a, c, g, or t
  misc_feature (1371)..(1373): n is a, c, g, or t
  misc_feature (1376)..(1378): n is a, c, g, or t
  misc_feature (1383)..(1383): n is a, c, g, or t
  misc_feature (1386)..(1386): n is a, c, g, or t
  misc_feature (1389)..(1392): n is a, c, g, or t
  misc_feature (1395)..(1395): n is a, c, g, or t
  misc_feature (1399)..(1399): n is a, c, g, or t
tagagaaattactatgagaggatcgcatcaccatcaccatcacggatcctatttaggtgacactatagaatcgtcgacccacgcgtccgccggcgggggagggggagaggcgggtgccggcggcggcgctgccgcagtggccgccggtggcgtggtgaccacgaccgcctcggggaagcgcatccggaagaaccatgcctgcgagatgtgtggcaaggccttccgcgacgtctaccacctgaaccgacacaagctgtcgcactcggacgagaagccctaccagtgcccggtgtgccagcagcgcttcaagcgcaaggaccgcatgagctaccacgtgcgctcacatgacggcgctgtgcacaagccctacaactgctcccactgtggcaagagcttctcccggccggatcacctcaacagtcacgtcagacaagtgcactcaacagaacggcccttcaaatgtgagaaatgtgaggcagctttcgccacgaaggatcggctgcgggcgcacacagtacgacacgaggagaaagtgccatgtcacgtgtgtggcaagatgctgagctcggcttatatttcggaccacatgaaggtgcacagccagggtcctcaccatgtctgtgagctctgcaacaaaggtactggtgaggtttgtccaatggcggcggcagcggcagcggcggcagcggcagcagcggcagcagtagcagcccctcccacagctgtgggctccctctcgggggcgganggggtgcctgtganctctcancccacttnccctcccaaccctggtgagctccaagttggttgcggggggaaaagggaaaaatggaattaaagtcccnttggtacaaanctccctctcccccntctttttcccaccaacttcntattttccttacnaaaccaaggaagccttccaaaaaggnaaaagaaagaaaaaaaattgtttttttttaaggggaattnccctaggtttttancnantttgttttctccctgctcctcttnctattcaaaacttganccccaaaaaaaactnttcccctnnggttggttttaantccccttgaaaanngggcangggngggnaaaanaaaaaaaaaaacccnttgncctnnacccccttttccttnttttaaaacccatgncctntttttccaggaatttnnaaccnttttnnttaaggnnntntttttnntttnannccntnccctggttttgnancccnttccnggnaatggggttttntttctttttttttttttccnngnnnnaaaaaaaaaaanngntaaaaanttntccnaaaanaaaannnnnnntttttnanannnnaaaaannnncccnaattttnntntnnagntttgggnnnggnnnccccnaantcnnnnttnaaana

SEQ ID NO: 198 - DNA, 930 bp, Homo Sapiens
atggatgtattcatgaaaggactttcaaaggccaaggagggagttgtggctgctgctgagaaaaccaaacagggtgtggcagaagcagcaggaaagacaaaagagggtgttctctatgtaggctccaaaaccaaggagggagtggtgcatggtgtggcaacagtggctgagaagaccaaagagcaagtgacaaatgttggaggagcagtggtgacgggtgtgacagcagtagcccagaagacagtggagggagcagggagcattgcagcagccactggctttgtcaaaaaggaccagttgggcaagaatgaagaaggagccccacaggaaggaattctggaagatatgcctgtggatcctgacaatgaggcttatgaaatgccttctgaggaagggtatcaagactacgaacctgaagcctaagcggccgctccctatagtgagtcgtattaagcttaattagctgagcttggactcctgttgatagatccagtaatgacctcagaactccatctggatttgttcagaacgctcggttgccgccgggcgttttttattggtgagaatccaagctagcttggcgagattttcaggagctaaggaagctaaaatggagaaaaaaatcactggatataccaccgttgatatatcccaatggcatcgtaaagaacattttgaggcatttcagtcagttgctcaatgtacctataaccagaccgttcagctggatattacggcctttttaaagaccgtaaagaaaataagcacaagttttatccggcctttattcacattcttgcccgcctgatgaatgctcatccggaatttcgtatggcaatgaaagacggtgagctggtgatatgggatagtgttcacccttgttacaccgttttccatgagcaaactgaaacgttttcatcgctctggagt

SEQ ID NO: 199 - DNA, 1388 bp, Homo Sapiens
  misc_feature (1)..(1): n is a, c, g, or t
  misc_feature (874)..(874): n is a, c, g, or t
  misc_feature (930)..(992): n is a, c, g, or t
  misc_feature (999)..(999): n is a, c, g, or t
  misc_feature (1003)..(1003): n is a, c, g, or t
  misc_feature (1007)..(1007): n is a, c, g, or t
  misc_feature (1015)..(1015): n is a, c, g, or t
  misc_feature (1028)..(1028): n is a, c, g, or t
  misc_feature (1031)..(1031): n is a, c, g, or t
  misc_feature (1037)..(1037): n is a, c, g, or t
  misc_feature (1042)..(1042): n is a, c, g, or t
  misc_feature (1059)..(1059): n is a, c, g, or t
  misc_feature (1066)..(1066): n is a, c, g, or t
  misc_feature (1068)..(1068): n is a, c, g, or t
  misc_feature (1075)..(1076): n is a, c, g, or t
  misc_feature (1079)..(1079): n is a, c, g, or t
  misc_feature (1086)..(1086): n is a, c, g, or t
  misc_feature (1092)..(1092): n is a, c, g, or t
  misc_feature (1122)..(1122): n is a, c, g, or t
  misc_feature (1126)..(1126): n is a, c, g, or t
  misc_feature (1128)..(1128): n is a, c, g, or t
  misc_feature (1131)..(1131): n is a, c, g, or t
  misc_feature (1135)..(1135): n is a, c, g, or t
  misc_feature (1139)..(1139): n is a, c, g, or t
  misc_feature (1144)..(1144): n is a, c, g, or t
  misc_feature (1147)..(1147): n is a, c, g, or t
  misc_feature (1149)..(1149): n is a, c, g, or t
  misc_feature (1153)..(1153): n is a, c, g, or t
  misc_feature (1155)..(1155): n is a, c, g, or t
  misc_feature (1157)..(1158): n is a, c, g, or t
  misc_feature (1161)..(1161): n is a, c, g, or t
  misc_feature (1164)..(1164): n is a, c, g, or t
  misc_feature (1171)..(1171): n is a, c, g, or t
  misc_feature (1174)..(1174): n is a, c, g, or t
  misc_feature (1178)..(1178): n is a, c, g, or t
  misc_feature (1184)..(1184): n is a, c, g, or t
  misc_feature (1187)..(1188): n is a, c, g, or t
  misc_feature (1190)..(1191): n is a, c, g, or t
  misc_feature (1197)..(1197): n is a, c, g, or t
  misc_feature (1201)..(1201): n is a, c, g, or t
  misc_feature (1210)..(1210): n is a, c, g, or t
  misc_feature (1217)..(1218): n is a, c, g, or t
  misc_feature (1221)..(1221): n is a, c, g, or t
  misc_feature (1224)..(1224): n is a, c, g, or t
  misc_feature (1227)..(1227): n is a, c, g, or t
  misc_feature (1233)..(1233): n is a, c, g, or t
  misc_feature (1237)..(1238): n is a, c, g, or t
  misc_feature (1241)..(1243): n is a, c, g, or t
  misc_feature (1245)..(1245): n is a, c, g, or t
  misc_feature (1248)..(1249): n is a, c, g, or t
  misc_feature (1251)..(1253): n is a, c, g, or t
  misc_feature (1262)..(1262): n is a, c, g, or t
  misc_feature (1264)..(1264): n is a, c, g, or t
  misc_feature (1273)..(1274): n is a, c, g, or t
  misc_feature (1276)..(1276): n is a, c, g, or t
  misc_feature (1280)..(1280): n is a, c, g, or t
  misc_feature (1284)..(1284): n is a, c, g, or t
  misc_feature (1290)..(1290): n is a, c, g, or t
  misc_feature (1292)..(1292): n is a, c, g, or t
  misc_feature (1298)..(1301): n is a, c, g, or t
  misc_feature (1307)..(1307): n is a, c, g, or t
  misc_feature (1314)..(1315): n is a, c, g, or t
  misc_feature (1320)..(1320): n is a, c, g, or t
  misc_feature (1322)..(1322): n is a, c, g, or t
  misc_feature (1327)..(1328): n is a, c, g, or t
  misc_feature (1330)..(1330): n is a, c, g, or t
  misc_feature (1332)..(1334): n is a, c, g, or t
  misc_feature (1337)..(1337): n is a, c, g, or t
  misc_feature (1340)..(1341): n is a, c, g, or t
  misc_feature (1347)..(1347): n is a, c, g, or t
  misc_feature (1353)..(1353): n is a, c, g, or t
  misc_feature (1356)..(1360): n is a, c, g, or t
  misc_feature (1362)..(1363): n is a, c, g, or t
  misc_feature (1365)..(1366): n is a, c, g, or t
  misc_feature (1368)..(1369): n is a, c, g, or t
  misc_feature (1372)..(1375): n is a, c, g, or t
  misc_feature (1378)..(1380): n is a, c, g, or t
  misc_feature (1388)..(1388): n is a, c, g, or t
nttagagaaattactatgagaggatcgcatcaccatcaccatcacggatcctatttaggtgacactatagaatcgtcgacccacgcgtccgaaaatgtggccaagacagctaacaaggaccacttggttacagcctataaccatctttttgaaactaagcgttttaagggtactgaaagtataagtaaagtgtctgagcaagtaaaaaatgtgaagcttaatgaagataaacccaaagaaaccaagtctgaagagaccctggatgagggtccaccaaaatatactaaatctgttctgaaaaagggagataaaaccaactttcccaaaaagggagatgttgttcactgctggtatacaggaacactacaagatgggactgtttttgatactaatattcaaacaagtgcaaagaagaagaaaaatgccaagcctttaagttttaaggtcggagtaggcaaagttatcagaggatgggatgaagctctcttgactatgagtaaaggagaaaaggctcgactggagattgaaccagaatgggcttacggaaagaaaggacagcctgatgccaaaattccaccaaatgcaaaactcacttttgaagtggaattagtggatattgattgaaatagcagtgcttcagctctaaggatattagcaacaatgataaaacttggccttgaagaaatttacacaactagttagaacttgttactattgtaaaggaagagtcaactggaaaattcaaggagttaataaaatttgtttacttggtcccagcttttgagagataaatcccttatgaatccctggtctaaaatactttcctacagctgtgtaaaatactggtcaaggagaactttttccttttacctcntgttgtaaacttaagtggctcaataaaaattgatcccctgtcttgatctgactgtnnnnnnnnnnnnnnnnnnnnnnnnnnnnnnnnnnnnnnnnnnnnnnnnnnnnnnnnnnnnnnnggggggncccncccnaagggggnccaataagcttanttnctgacnttggnccccggggaaaatcccnaaggccncnaaccccnnggntttttcnaaaccncggttgcccccggggtttttttggggaaancccncnacntggngaantttcnggncnaggnancnnaanggnaaaaaanccngggnaccccnttnnanncccggncccnaaaaatttnggggttnnccntgnccngggccnaacnnccnnncnggnntnnnccttttaancnaaaaaaaannantttncccntttttntncccccnnnncccccnttttggnnaaaangnggggnngnannnccnttnntttttnaaaaanttnnnnngnnannannctnnnnttnnngggggggn

SEQ ID NO: 200 - DNA, 1349 bp, Homo Sapiens
  misc_feature (807)..(807): n is a, c, g, or t
  misc_feature (866)..(866): n is a, c, g, or t
  misc_feature (927)..(927): n is a, c, g, or t
  misc_feature (969)..(969): n is a, c, g, or t
  misc_feature (990)..(991): n is a, c, g, or t
  misc_feature (1004)..(1004): n is a, c, g, or t
  misc_feature (1020)..(1020): n is a, c, g, or t
  misc_feature (1024)..(1024): n is a, c, g, or t
  misc_feature (1037)..(1037): n is a, c, g, or t
  misc_feature (1040)..(1040): n is a, c, g, or t
  misc_feature (1043)..(1043): n is a, c, g, or t
  misc_feature (1045)..(1045): n is a, c, g, or t
  misc_feature (1050)..(1050): n is a, c, g, or t
  misc_feature (1056)..(1056): n is a, c, g, or t
  misc_feature (1070)..(1070): n is a, c, g, or t
  misc_feature (1089)..(1089): n is a, c, g, or t
  misc_feature (1094)..(1094): n is a, c, g, or t
  misc_feature (1135)..(1135): n is a, c, g, or t
  misc_feature (1137)..(1137): n is a, c, g, or t
  misc_feature (1139)..(1139): n is a, c, g, or t
  misc_feature (1150)..(1150): n is a, c, g, or t
  misc_feature (1155)..(1156): n is a, c, g, or t
  misc_feature (1164)..(1164): n is a, c, g, or t
  misc_feature (1168)..(1168): n is a, c, g, or t
  misc_feature (1170)..(1170): n is a, c, g, or t
  misc_feature (1172)..(1172): n is a, c, g, or t
  misc_feature (1177)..(1177): n is a, c, g, or t
  misc_feature (1179)..(1179): n is a, c, g, or t
  misc_feature (1182)..(1182): n is a, c, g, or t
  misc_feature (1185)..(1185): n is a, c, g, or t
  misc_feature (1187)..(1187): n is a, c, g, or t
  misc_feature (1198)..(1198): n is a, c, g, or t
  misc_feature (1205)..(1205): n is a, c, g, or t
  misc_feature (1216)..(1216): n is a, c, g, or t
  misc_feature (1222)..(1223): n is a, c, g, or t
  misc_feature (1225)..(1225): n is a, c, g, or t
  misc_feature (1227)..(1227): n is a, c, g, or t
  misc_feature (1232)..(1235): n is a, c, g, or t
  misc_feature (1245)..(1246): n is a, c, g, or t
  misc_feature (1254)..(1257): n is a, c, g, or t
  misc_feature (1264)..(1264): n is a, c, g, or t
  misc_feature (1274)..(1274): n is a, c, g, or t
  misc_feature (1276)..(1276): n is a, c, g, or t
  misc_feature (1280)..(1280): n is a, c, g, or t
  misc_feature (1283)..(1284): n is a, c, g, or t
  misc_feature (1291)..(1292): n is a, c, g, or t
  misc_feature (1295)..(1295): n is a, c, g, or t
  misc_feature (1297)..(1297): n is a, c, g, or t
  misc_feature (1311)..(1311): n is a, c, g, or t
  misc_feature (1319)..(1321): n is a, c, g, or t
  misc_feature (1325)..(1325): n is a, c, g, or t
  misc_feature (1329)..(1329): n is a, c, g, or t
  misc_feature (1331)..(1331): n is a, c, g, or t
  misc_feature (1339)..(1341): n is a, c, g, or t
  misc_feature (1345)..(1348): n is a, c, g, or t
attagagaaattactatgagaggatcgcatcaccatcaccatcacggatcctatttaggtgacactatagaatcgtcgacccacgcgtccgcccacgcgtccggcaaaaccaacgcctggctcggagcagcagcctctgaggtgtccctggccagtgtccttccacctgtccacaagcatggggaacatcttcgccaacctcttcaagggcctttttggcaaaaaagaaatgcgcatcctcatggtgggcctggatgctgcagggaagaccacgatcctctacaagcttaagctgggtgagatcgtgaccaccattcccaccataggcttcaacgtggaaaccgtggagtacaagaacatcagcttcactgtgtgggacgtgggtggccaggacaagatccggcccctgtggcgccactacttccagaacacacaaggcctgatcttcgtggtggacagcaatgacagagagcgtgtgaacgaggcccgtgaggagctcatgaggatgctggccgaggacgagctccgggatgctgtcctcctggtgttcgccaacaagcaggacctccccaacgccatgaatgcggccgagatcacagacaagctggggctgcactcactacgccacaggaactggtacattcaggccacctgcgccaccagcggcgacgggctctatgaaggactggactggctgtccaatcagctccggaaccagaagtgaacgcgacccccctccctctcactcctcttgccctctgctttactctcatgtggcaaacgtgcggctcgtggtgtgagtgccanaagctgcctccgtggtttggtcaccgtgtgcatcgcaccgtgctgtaaatgtggcaaangcagcctgcggccaggcttttttattttaatgaaaatagtttttgtttccaatgaaggcantttctggtactcctatgcaataattactcacttttttttatngtaaaaaaaaaaaatcactcnnttgtttcatgctnaaaaggggaagttagncccnatgggcaccttgnccnccnanaaatncctttntttggaaaaacccngccacccccttgggctttnaaagntgggttgaaatccatttttgggggtgggttttaacccaaancncntggattttttnaaaannttaaaaanccantncnaaaancnttnacncncaaaagggaanccccccnaaaaaaatttncaattnngncngggannnnttcccccccnnttttcccnnnnaaaaaanggggggggcnanaaanggnnaattttnngtnanaaaaaattccccancccttttnnntggncccntntttaaatnnntttnnnng

SEQ ID NO: 201 - DNA, 1335 bp, Homo Sapiens
  misc_feature (9)..(9): n is a, c, g, or t
  misc_feature (806)..(806): n is a, c, g, or t
  misc_feature (871)..(871): n is a, c, g, or t
  misc_feature (875)..(875): n is a, c, g, or t
  misc_feature (877)..(877): n is a, c, g, or t
  misc_feature (883)..(883): n is a, c, g, or t
  misc_feature (886)..(886): n is a, c, g, or t
  misc_feature (921)..(921): n is a, c, g, or t
  misc_feature (935)..(935): n is a, c, g, or t
  misc_feature (957)..(957): n is a, c, g, or t
  misc_feature (959)..(959): n is a, c, g, or t
  misc_feature (971)..(971): n is a, c, g, or t
  misc_feature (974)..(974): n is a, c, g, or t
  misc_feature (986)..(986): n is a, c, g, or t
  misc_feature (992)..(992): n is a, c, g, or t
  misc_feature (997)..(997): n is a, c, g, or t
  misc_feature (1006)..(1006): n is a, c, g, or t
  misc_feature (1030)..(1030): n is a, c, g, or t
  misc_feature (1033)..(1033): n is a, c, g, or t
  misc_feature (1040)..(1040): n is a, c, g, or t
  misc_feature (1052)..(1052): n is a, c, g, or t
  misc_feature (1057)..(1057): n is a, c, g, or t
  misc_feature (1066)..(1066): n is a, c, g, or t
  misc_feature (1069)..(1069): n is a, c, g, or t
  misc_feature (1073)..(1073): n is a, c, g, or t
  misc_feature (1091)..(1091): n is a, c, g, or t
  misc_feature (1108)..(1108): n is a, c, g, or t
  misc_feature (1120)..(1120): n is a, c, g, or t
  misc_feature (1126)..(1126): n is a, c, g, or t
  misc_feature (1129)..(1129): n is a, c, g, or t
  misc_feature (1142)..(1143): n is a, c, g, or t
  misc_feature (1151)..(1152): n is a, c, g, or t
  misc_feature (1155)..(1155): n is a, c, g, or t
  misc_feature (1157)..(1157): n is a, c, g, or t
  misc_feature (1159)..(1159): n is a, c, g, or t
  misc_feature (1170)..(1170): n is a, c, g, or t
  misc_feature (1172)..(1172): n is a, c, g, or t
  misc_feature (1175)..(1175): n is a, c, g, or t
  misc_feature (1181)..(1181): n is a, c, g, or t
  misc_feature (1186)..(1186): n is a, c, g, or t
  misc_feature (1191)..(1192): n is a, c, g, or t
  misc_feature (1199)..(1199): n is a, c, g, or t
  misc_feature (1204)..(1204): n is a, c, g, or t
  misc_feature (1206)..(1206): n is a, c, g, or t
  misc_feature (1216)..(1216): n is a, c, g, or t
  misc_feature (1229)..(1229): n is a, c, g, or t
  misc_feature (1236)..(1237): n is a, c, g, or t
  misc_feature (1253)..(1253): n is a, c, g, or t
  misc_feature (1261)..(1261): n is a, c, g, or t
  misc_feature (1273)..(1273): n is a, c, g, or t
  misc_feature (1281)..(1281): n is a, c, g, or t
  misc_feature (1289)..(1290): n is a, c, g, or t
  misc_feature (1294)..(1294): n is a, c, g, or t
  misc_feature (1298)..(1298): n is a, c, g, or t
  misc_feature (1303)..(1305): n is a, c, g, or t
  misc_feature (1310)..(1310): n is a, c, g, or t
  misc_feature (1312)..(1312): n is a, c, g, or t
  misc_feature (1322)..(1324): n is a, c, g, or t
  misc_feature (1326)..(1327): n is a, c, g, or t
  misc_feature (1329)..(1329): n is a, c, g, or t
attagaganattactatgagaggatcgcatcaccatcaccattcacggatcctatttaggtgacactatagaatcgtcgacccacgcgtccgcccacgcgtccggggacaacggccacctgtaccgggaggaccagacctcccccgcgccgggcctccgctgcctcaactggctggacgcgcagagcgggctggcctcggcccccgtgtcgggggccggcaatcacagttactgccgaaacccggacgaggacccgcgcgggccctggtgctacgtcagtggcgaggccggcgtccctgagaaacggccttgcgaggacctgcgctgtccagagaccacctcccaggccctgccagccttcacgacagaaatccaggaagcgtctgaagggccaggtgcagatgaggtgcaggtgttcgctcctgccaacgccctgcccgctcggagtgaggcggcagctgtgcagccagtgattgggatcagccagcgggtgcggatgaactccaaggagaaaaaggacctgggaactctggggggaaggatttgaaagaacagcatgatcagaaagtatgtgagagggagatgcagcgaatcactctgcccttgtctgccttcaccaaccccacctgtgagattgtggatgagaagactgtcgtggtccacaccagccagactccagttgaccctcaggagggcaccaccccccttatgggccaggccgggactcctggggcctgagcccccccagtgggcaggagcccatgcagacactggtgcaggacagcccaccctcctacagctaggangaactaccactttgtgttctggttaaaaccctaccactccccccgctttttttggcgaatcctantaanantgacanaancaggtggccctgtgggctgaagggtaaggctgggntagggtcctaacantgctccttgtccatcccttggnancaaatttttttnttntggatggaaaanagtggncaacntccccacantgaatgcttgcttgctaaggggcnttnccaaaanatttgccttgcnccccntggaaactnaanccangggataaaacggggaacntccccccaggcttcctntgtggttttaanaaaaanggncctcaattttccnnttgggggnnttnantnggcaaaaaccntnttntttctnggttnaaggnnaaaaccnggttnangggattggcnttttaaaaaaaanatttttnntttttaaaaaattttnggaaaggnaattcccttttngacctttnaaaaatgnnaaanaaanttttnnnaaaantnaaaaattttnnntnngnaaaaaa

SEQ ID NO: 202 - DNA, 810 bp, Homo Sapiens
taactatgagaggatcgcatcaccatcaccatcacggatcctatttaggtgacactatagaatcgtcgacccacgcgtccgcggacgcgtgggcagccccagacacggaccccgcaggagatgggtgcccccatccgcacactgtcctttggccaccggacatcatgcctcccaagaaggatgttcccgtgaagaaaccagcagggccctccatctccaaacctgctgctaagccagcagcagcaggggctcctccagccaagaccaaagctgagccagctgtcccccaggcccctcagaaaacccaggagcctccagtcgatctctccaaagtggtgatcgagtttaacaaggaccagctggaggagttcaaggaggccttcgagctgtttgaccgagtgggggatggcaagatcctgtacagccagtgtggggacgtgatgagggccctgggccagaaccccaccaacgccgaggtgctcaaggtcctggggaaccccaagagtgatgagctgaagtcgcggcgtgtggactttgagactttcctgcccatgctccaggcagtggccaagaaccgaggccaaggagagaagatgactgaggaggaggtggagaccgttctggcaggacacgaggacagcaacggctgcatcaactacgaggccttcttgaaacacatcctaagcgtctgagtgctgcagatccagtggggtccggacactgggccccgcaggcgaaagcacgttccagccaccaggaggccacctattgtttcaaaataaagactgggttcctcaaaaaaaaaaaata

SEQ ID NO: 203 - DNA, 1415 bp, Homo Sapiens
  misc_feature (854)..(854): n is a, c, g, or t
  misc_feature (914)..(914): n is a, c, g, or t
  misc_feature (925)..(925): n is a, c, g, or t
  misc_feature (930)..(930): n is a, c, g, or t
  misc_feature (975)..(975): n is a, c, g, or t
  misc_feature (992)..(992): n is a, c, g, or t
  misc_feature (998)..(998): n is a, c, g, or t
  misc_feature (1019)..(1019): n is a, c, g, or t
  misc_feature (1025)..(1025): n is a, c, g, or t
  misc_feature (1042)..(1042): n is a, c, g, or t
  misc_feature (1048)..(1048): n is a, c, g, or t
  misc_feature (1052)..(1052): n is a, c, g, or t
  misc_feature (1057)..(1058): n is a, c, g, or t
  misc_feature (1062)..(1062): n is a, c, g, or t
  misc_feature (1067)..(1067): n is a, c, g, or t
  misc_feature (1089)..(1089): n is a, c, g, or t
  misc_feature (1103)..(1103): n is a, c, g, or t
  misc_feature (1105)..(1105): n is a, c, g, or t
  misc_feature (1108)..(1108): n is a, c, g, or t
  misc_feature (1111)..(1112): n is a, c, g, or t
  misc_feature (1115)..(1115): n is a, c, g, or t
  misc_feature (1122)..(1122): n is a, c, g, or t
  misc_feature (1124)..(1125): n is a, c, g, or t
  misc_feature (1129)..(1129): n is a, c, g, or t
  misc_feature (1131)..(1131): n is a, c, g, or t
  misc_feature (1140)..(1140): n is a, c, g, or t
  misc_feature (1142)..(1142): n is a, c, g, or t
  misc_feature (1147)..(1147): n is a, c, g, or t
  misc_feature (1151)..(1151): n is a, c, g, or t
  misc_feature (1158)..(1158): n is a, c, g, or t
  misc_feature (1168)..(1168): n is a, c, g, or t
  misc_feature (1170)..(1170): n is a, c, g, or t
  misc_feature (1175)..(1175): n is a, c, g, or t
  misc_feature (1187)..(1187): n is a, c, g, or t
  misc_feature (1190)..(1190): n is a, c, g, or t
  misc_feature (1193)..(1195): n is a, c, g, or t
  misc_feature (1200)..(1201): n is a, c, g, or t
  misc_feature (1209)..(1209): n is a, c, g, or t
  misc_feature (1211)..(1211): n is a, c, g, or t
  misc_feature (1214)..(1214): n is a, c, g, or t
  misc_feature (1216)..(1216): n is a, c, g, or t
  misc_feature (1221)..(1222): n is a, c, g, or t
  misc_feature (1229)..(1229): n is a, c, g, or t
  misc_feature (1243)..(1244): n is a, c, g, or t
  misc_feature (1255)..(1255): n is a, c, g, or t
  misc_feature (1258)..(1259): n is a, c, g, or t
  misc_feature (1261)..(1261): n is a, c, g, or t
  misc_feature (1275)..(1275): n is a, c, g, or t
  misc_feature (1282)..(1284): n is a, c, g, or t
  misc_feature (1292)..(1293): n is a, c, g, or t
  misc_feature (1301)..(1301): n is a, c, g, or t
  misc_feature (1303)..(1304): n is a, c, g, or t
  misc_feature (1307)..(1307): n is a, c, g, or t
  misc_feature (1314)..(1314): n is a, c, g, or t
  misc_feature (1320)..(1320): n is a, c, g, or t
  misc_feature (1323)..(1323): n is a, c, g, or t
  misc_feature (1325)..(1325): n is a, c, g, or t
  misc_feature (1328)..(1328): n is a, c, g, or t
  misc_feature (1344)..(1345): n is a, c, g, or t
  misc_feature (1347)..(1347): n is a, c, g, or t
  misc_feature (1349)..(1349): n is a, c, g, or t
  misc_feature (1351)..(1351): n is a, c, g, or t
  misc_feature (1371)..(1371): n is a, c, g, or t
  misc_feature (1376)..(1376): n is a, c, g, or t
  misc_feature (1385)..(1385): n is a, c, g, or t
  misc_feature (1396)..(1396): n is a, c, g, or t
  misc_feature (1400)..(1400): n is a, c, g, or t
  misc_feature (1406)..(1408): n is a, c, g, or t
  misc_feature (1410)..(1410): n is a, c, g, or t
  misc_feature (1412)..(1412): n is a, c, g, or t
  misc_feature (1414)..(1414): n is a, c, g, or t
tagagaaattactatgagaggatcgcatcaccatcaccatcacggatcctatttaggtgacactatagaatcgtcgacccacgcgtccggatcgccattttccactactcgtcgtagttgggacgacagcgagagttcgggaaccaacctgaatattgataatgaggactattccaggtatccgccaagagagtacagagcttcgggtagcagaagaggaatggcctatggacatattgactcttatggggcagatgatagtgaggaggagggggctgggcctgttgagcgaccgccagtgagagggaaaactggcaagtttaaagatgataagctgtatgacccagagaaaggggcaaggtctttggctgggccacctccacatttctctagttttagccgtgatgtgagagaggagcgagacaagttagacccagtccctgcagcaagatgctcagctagcagagctgacttcctgccacaaagtagtgtggcctcacagtcgtcttctgaaggcaagctggctacaaaaggtgacagctcggagagggagagaagggagcaaaatttacctgcacgtcccagcagggctcctgtgagtatttgtggtggtggggaaaacacctcaaagagtgcagaggaacctgtggtcaggcccaaaatcagaaacctggcaagtccaaactgcgtgaaaccaaaaattttttttgatactgatgatgatgacgatatgccacacagtacttccaggtggagggataccgccaatgacaatgagggccactcggatggcctggcaagaagagggagaggcgagagttcaagtggctatcccgagccaaagtaccctgaanacaaaacgggaagcgaggagtgaccaagtgaaaccagaaaaaggtgccgagacgacgacncaccatggccnaaccntgacttctggacgcccagtgatgattactacaaaatactgcgacnaaaactctgacagtganaaaaantggaattgctgctctgcctcngaaaanatccaaacccgaaaacnaacccntgtnccccnngtgncaaancctgggaaaactctgcccgggnaaaaaaaaacgggnanccnccnnagnctaaggngnntgcncnccctgggcncnacccntggnccccggngctaatgccnantgccngggctggccccnggnccnnntttgnnaccatggncncantnccttnnaaaaatncaaaaccctctttnnggaaaaaaagnctnncncggaaaaagaaaanttcttgnnncccccccnnaaaaaaanannccnggggggnaaaaanttngnccnaatttaaccccggggnntntngnggggaaaaacctttaaaaanccctngggaaaaancaaaggggtgncccntttggnnntnanang

SEQ ID NO: 204 - DNA, 1200 bp, Homo Sapiens
  misc_feature (278)..(278): n is a, c, g, or t
  misc_feature (413)..(413): n is a, c, g, or t
  misc_feature (565)..(565): n is a, c, g, or t
  misc_feature (609)..(609): n is a, c, g, or t
  misc_feature (621)..(621): n is a, c, g, or t
  misc_feature (627)..(627): n is a, c, g, or t
  misc_feature (662)..(662): n is a, c, g, or t
  misc_feature (666)..(666): n is a, c, g, or t
  misc_feature (669)..(669): n is a, c, g, or t
  misc_feature (686)..(686): n is a, c, g, or t
  misc_feature (699)..(699): n is a, c, g, or t
  misc_feature (724)..(724): n is a, c, g, or t
  misc_feature (735)..(735): n is a, c, g, or t
  misc_feature (740)..(741): n is a, c, g, or t
  misc_feature (743)..(743): n is a, c, g, or t
  misc_feature (757)..(757): n is a, c, g, or t
  misc_feature (761)..(761): n is a, c, g, or t
  misc_feature (766)..(767): n is a, c, g, or t
  misc_feature (773)..(774): n is a, c, g, or t
  misc_feature (780)..(780): n is a, c, g, or t
  misc_feature (785)..(785): n is a, c, g, or t
  misc_feature (787)..(787): n is a, c, g, or t
  misc_feature (792)..(792): n is a, c, g, or t
  misc_feature (795)..(796): n is a, c, g, or t
  misc_feature (798)..(798): n is a, c, g, or t
  misc_feature (800)..(800): n is a, c, g, or t
  misc_feature (804)..(804): n is a, c, g, or t
  misc_feature (809)..(809): n is a, c, g, or t
  misc_feature (811)..(811): n is a, c, g, or t
  misc_feature (818)..(818): n is a, c, g, or t
  misc_feature (821)..(821): n is a, c, g, or t
  misc_feature (824)..(824): n is a, c, g, or t
  misc_feature (827)..(827): n is a, c, g, or t
  misc_feature (835)..(835): n is a, c, g, or t
  misc_feature (846)..(846): n is a, c, g, or t
  misc_feature (850)..(850): n is a, c, g, or t
  misc_feature (852)..(852): n is a, c, g, or t
  misc_feature (861)..(861): n is a, c, g, or t
  misc_feature (866)..(866): n is a, c, g, or t
  misc_feature (870)..(870): n is a, c, g, or t
  misc_feature (878)..(878): n is a, c, g, or t
  misc_feature (880)..(881): n is a, c, g, or t
  misc_feature (883)..(883): n is a, c, g, or t
  misc_feature (888)..(888): n is a, c, g, or t
  misc_feature (895)..(896): n is a, c, g, or t
  misc_feature (900)..(901): n is a, c, g, or t
  misc_feature (906)..(906): n is a, c, g, or t
  misc_feature (909)..(909): n is a, c, g, or t
  misc_feature (912)..(912): n is a, c, g, or t
  misc_feature (918)..(919): n is a, c, g, or t
  misc_feature (924)..(924): n is a, c, g, or t
  misc_feature (934)..(935): n is a, c, g, or t
  misc_feature (937)..(937): n is a, c, g, or t
  misc_feature (949)..(949): n is a, c, g, or t
  misc_feature (956)..(956): n is a, c, g, or t
  misc_feature (965)..(965): n is a, c, g, or t
  misc_feature (992)..(992): n is a, c, g, or t
  misc_feature (997)..(997): n is a, c, g, or t
  misc_feature (1010)..(1011): n is a, c, g, or t
  misc_feature (1013)..(1013): n is a, c, g, or t
  misc_feature (1015)..(1015): n is a, c, g, or t
  misc_feature (1017)..(1017): n is a, c, g, or t
  misc_feature (1026)..(1026): n is a, c, g, or t
  misc_feature (1033)..(1033): n is a, c, g, or t
  misc_feature (1036)..(1036): n is a, c, g, or t
  misc_feature (1038)..(1039): n is a, c, g, or t
  misc_feature (1051)..(1051): n is a, c, g, or t
  misc_feature (1068)..(1068): n is a, c, g, or t
  misc_feature (1074)..(1074): n is a, c, g, or t
  misc_feature (1076)..(1076): n is a, c, g, or t
  misc_feature (1078)..(1078): n is a, c, g, or t
  misc_feature (1080)..(1080): n is a, c, g, or t
  misc_feature (1085)..(1085): n is a, c, g, or t
  misc_feature (1087)..(1087): n is a, c, g, or t
  misc_feature (1099)..(1100): n is a, c, g, or t
  misc_feature (1103)..(1103): n is a, c, g, or t
  misc_feature (1106)..(1106): n is a, c, g, or t
  misc_feature (1111)..(1111): n is a, c, g, or t
  misc_feature (1115)..(1116): n is a, c, g, or t
  misc_feature (1119)..(1119): n is a, c, g, or t
  misc_feature (1123)..(1123): n is a, c, g, or t
  misc_feature (1126)..(1126): n is a, c, g, or t
  misc_feature (1129)..(1129): n is a, c, g, or t
  misc_feature (1143)..(1143): n is a, c, g, or t
  misc_feature (1146)..(1146): n is a, c, g, or t
  misc_feature (1148)..(1149): n is a, c, g, or t
  misc_feature (1161)..(1161): n is a, c, g, or t
  misc_feature (1169)..(1169): n is a, c, g, or t
  misc_feature (1173)..(1173): n is a, c, g, or t
  misc_feature (1177)..(1177): n is a, c, g, or t
  misc_feature (1181)..(1182): n is a, c, g, or t
  misc_feature (1187)..(1187): n is a, c, g, or t
  misc_feature (1192)..(1192): n is a, c, g, or t
  misc_feature (1197)..(1197): n is a, c, g, or t
  misc_feature (1200)..(1200): n is a, c, g, or t
tagagagattactatgagaggatcgcatcaccatcaccatcacgggatcctatttaggtgacactatagaatcgtcgacccacgcgtccgctaaggaaaagctctggaaagggccaacggagcggatattcccggagcccctctgcgagccacgcgcccctctgggaagcccgcttccccctgcagacaggcgctgtgacacgcttgcgccccggtcgaacaggcgaagaggccgaggcccagagcggcgcagggcgagcctggaggctgcgccccanacctggaccagccacggacgccgctcccgccgctccctccgctccgctgcgctccgcacgctggcgccggctccccgaggccccgggcgccccggccgcacgcctgggtaaaaggtcccgaggagtccgcagaancgcgcccacgcccgagacggccgtttccgccggcctgggaaaggggcggagaagggggtcgcccgggccgcagcgtgccggtccccgccggccgagccgtgtttggggccagtccccgcaccccgcttcttccccacctggggagcggggcnccgcggtaggggcactggagcgcacgatgcaccccgccaacgantcctttctgcanacgggnttcctgttttcatgcaaatgcctttgttagcgcancggnaancatggggacggaactgnaactgacgcgggntgcgcgccgctttttccgccttcgnttgattcggcntcaannanttaaacgcgccggnaacnaaaanngcctgnnccgcgnaaaancnttcanganngntncganaaagngnggctccnctnggntcnccgaaaantgatgcggaangggncngggctggtngcctncaancccttttncnnanatcancaaaggnnaatnnaaccntcnaanttgttnnttaantttttttaanntncattggaaattncttaaantaaggaacncacttttagtgtcctcccatttttgtntatanttattttgttccnnancnantgttggaangcaaacnttnannaaatttttttangagtaattttccttttnccaaantnananggatntnaaacaataaatnnttntcnttttntttnnttntaanaantanaaaattattataanagngnngttttctccttnatgtgaanttanaaancttnnttatntaaanctagntcn

SEQ ID NO: 205 - DNA, 1198 bp, Homo Sapiens
  misc_feature (715)..(715): n is a, c, g, or t
  misc_feature (731)..(731): n is a, c, g, or t
  misc_feature (765)..(765): n is a, c, g, or t
  misc_feature (856)..(856): n is a, c, g, or t
  misc_feature (875)..(875): n is a, c, g, or t
  misc_feature (903)..(903): n is a, c, g, or t
  misc_feature (908)..(908): n is a, c, g, or t
  misc_feature (917)..(917): n is a, c, g, or t
  misc_feature (928)..(928): n is a, c, g, or t
  misc_feature (931)..(931): n is a, c, g, or t
  misc_feature (936)..(936): n is a, c, g, or t
  misc_feature (938)..(938): n is a, c, g, or t
  misc_feature (940)..(940): n is a, c, g, or t
  misc_feature (948)..(949): n is a, c, g, or t
  misc_feature (954)..(954): n is a, c, g, or t
  misc_feature (957)..(957): n is a, c, g, or t
  misc_feature (962)..(963): n is a, c, g, or t
  misc_feature (965)..(965): n is a, c, g, or t
  misc_feature (972)..(972): n is a, c, g, or t
  misc_feature (977)..(977): n is a, c, g, or t
  misc_feature (983)..(983): n is a, c, g, or t
  misc_feature (986)..(987): n is a, c, g, or t
  misc_feature (991)..(991): n is a, c, g, or t
  misc_feature (997)..(997): n is a, c, g, or t
  misc_feature (999)..(999): n is a, c, g, or t
  misc_feature (1008)..(1008): n is a, c, g, or t
  misc_feature (1022)..(1023): n is a, c, g, or t
  misc_feature (1025)..(1025): n is a, c, g, or t
  misc_feature (1030)..(1030): n is a, c, g, or t
  misc_feature (1038)..(1038): n is a, c, g, or t
  misc_feature (1043)..(1044): n is a, c, g, or t
  misc_feature (1048)..(1048): n is a, c, g, or t
  misc_feature (1060)..(1060): n is a, c, g, or t
  misc_feature (1069)..(1070): n is a, c, g, or t
  misc_feature (1073)..(1073): n is a, c, g, or t
  misc_feature (1075)..(1075): n is a, c, g, or t
  misc_feature (1081)..(1081): n is a, c, g, or t
  misc_feature (1088)..(1088): n is a, c, g, or t
  misc_feature (1093)..(1094): n is a, c, g, or t
  misc_feature (1106)..(1108): n is a, c, g, or t
  misc_feature (1110)..(1110): n is a, c, g, or t
  misc_feature (1112)..(1113): n is a, c, g, or t
  misc_feature (1115)..(1115): n is a, c, g, or t
  misc_feature (1118)..(1118): n is a, c, g, or t
  misc_feature (1121)..(1121): n is a, c, g, or t
  misc_feature (1126)..(1128): n is a, c, g, or t
  misc_feature (1130)..(1130): n is a, c, g, or t
  misc_feature (1133)..(1133): n is a, c, g, or t
  misc_feature (1139)..(1140): n is a, c, g, or t
  misc_feature (1143)..(1144): n is a, c, g, or t
  misc_feature (1148)..(1148): n is a, c, g, or t
  misc_feature (1154)..(1154): n is a, c, g, or t
  misc_feature (1165)..(1165): n is a, c, g, or t
  misc_feature (1169)..(1169): n is a, c, g, or t
  misc_feature (1171)..(1173): n is a, c, g, or t
  misc_feature (1177)..(1177): n is a, c, g, or t
  misc_feature (1179)..(1180): n is a, c, g, or t
  misc_feature (1182)..(1184): n is a, c, g, or t
  misc_feature (1186)..(1186): n is a, c, g, or t
  misc_feature (1188)..(1188): n is a, c, g, or t
  misc_feature (1191)..(1193): n is a, c, g, or t
aatagagaaattactatgagaggatcgcatcaccatcaccatcacggatcctatttaggtgacactatagaatcgtcgacccacgcgtccggtctgtccagccctgggaagcgaccttggcctcagttcacagcctggtgctcatctgctggcaccgggcatccacccatcagcccccgccctgtccctccgaaggacacccagcaggcaccccccggggaggcaggggcagaggtcagaaggggtgtctgggacctggatggccagcagggacaggggcattgtcatctcaaaggcccaacccccagaggccacaccagtcctcccagggagtcctcgagtcgccctgcccagagccctggcaccagagacgccaagagcctgtggggtgactcggagcagcaggtgtggccccgggcgggcggcaccgcgtccagggcagcctccctccgctgagtgacacgggacaccagtgcccggccgacgcgcctttgcaggagaaatgtgcaaacctctgtggataccatttcatttccattcttgtgttgtctccaaggcccttttggagatatacttggtgttggttgtgtttttttggttccttttcagagaactgtaaaccgaggctgacgtgctccactgactgtgccgaggggcgggggcaggaggacggcaagacctatttataatatttagcgaactcggtctccctcanatcccccgcgagggangctgctggacccaccccgctgtcccccatgatanaagtctgtaaataccttggtgaccaatgcccacttcccctcctgggtcacctctgatggctgctgtccactgaaaacgtgggcagtgtccnaaattcctgtactgtaaanactaaaaggcgtttgctctgaaactganaaggnggaaacttncatgtgtctcntgncaggntntntcccctannccatnccnaaaanntncccgttnccccnaaaacntgnntcantggaanantcccattgncatggggtcctttnncnatggnaatgtttncaaanncctnaattcccacccnagaaaaggnnccngncaactncctcttnatttnnggggggttaatnnntncnncngtnccnaaccnnntnccntttttnnggnnaaanttattntaaaaaaaaanaaantnnnaacntnngnnntntnaannnccccc

SEQ ID NO: 206 - DNA, 1413 bp, Homo Sapiens
  misc_feature (858)..(858): n is a, c, g, or t
  misc_feature (931)..(931): n is a, c, g, or t
  misc_feature (934)..(934): n is a, c, g, or t
  misc_feature (961)..(961): n is a, c, g, or t
  misc_feature (963)..(963): n is a, c, g, or t
  misc_feature (966)..(966): n is a, c, g, or t
  misc_feature (968)..(968): n is a, c, g, or t
  misc_feature (972)..(972): n is a, c, g, or t
  misc_feature (992)..(992): n is a, c, g, or t
  misc_feature (1002)..(1002): n is a, c, g, or t
  misc_feature (1008)..(1008): n is a, c, g, or t
  misc_feature (1011)..(1011): n is a, c, g, or t
  misc_feature (1034)..(1034): n is a, c, g, or t
  misc_feature (1040)..(1040): n is a, c, g, or t
  misc_feature (1044)..(1044): n is a, c, g, or t
  misc_feature (1054)..(1054): n is a, c, g, or t
  misc_feature (1094)..(1094): n is a, c, g, or t
  misc_feature (1104)..(1104): n is a, c, g, or t
  misc_feature (1115)..(1115): n is a, c, g, or t
  misc_feature (1122)..(1122): n is a, c, g, or t
  misc_feature (1127)..(1128): n is a, c, g, or t
  misc_feature (1138)..(1138): n is a, c, g, or t
  misc_feature (1149)..(1149): n is a, c, g, or t
  misc_feature (1151)..(1151): n is a, c, g, or t
  misc_feature (1166)..(1166): n is a, c, g, or t
  misc_feature (1170)..(1171): n is a, c, g, or t
  misc_feature (1173)..(1173): n is a, c, g, or t
  misc_feature (1176)..(1176): n is a, c, g, or t
  misc_feature (1178)..(1178): n is a, c, g, or t
  misc_feature (1190)..(1190): n is a, c, g, or t
  misc_feature (1192)..(1192): n is a, c, g, or t
  misc_feature (1197)..(1197): n is a, c, g, or t
  misc_feature (1206)..(1206): n is a, c, g, or t
  misc_feature (1214)..(1214): n is a, c, g, or t
  misc_feature (1235)..(1235): n is a, c, g, or t
  misc_feature (1242)..(1242): n is a, c, g, or t
  misc_feature (1245)..(1245): n is a, c, g, or t
  misc_feature (1247)..(1248): n is a, c, g, or t
  misc_feature (1253)..(1253): n is a, c, g, or t
  misc_feature (1255)..(1255): n is a, c, g, or t
  misc_feature (1267)..(1267): n is a, c, g, or t
  misc_feature (1275)..(1275): n is a, c, g, or t
  misc_feature (1277)..(1277): n is a, c, g, or t
  misc_feature (1282)..(1282): n is a, c, g, or t
  misc_feature (1284)..(1285): n is a, c, g, or t
  misc_feature (1293)..(1293): n is a, c, g, or t
  misc_feature (1298)..(1298): n is a, c, g, or t
  misc_feature (1300)..(1300): n is a, c, g, or t
  misc_feature (1302)..(1302): n is a, c, g, or t
  misc_feature (1312)..(1312): n is a, c, g, or t
  misc_feature (1324)..(1324): n is a, c, g, or t
  misc_feature (1329)..(1329): n is a, c, g, or t
  misc_feature (1336)..(1336): n is a, c, g, or t
  misc_feature (1351)..(1351): n is a, c, g, or t
  misc_feature (1364)..(1364): n is a, c, g, or t
  misc_feature (1372)..(1373): n is a, c, g, or t
  misc_feature (1375)..(1375): n is a, c, g, or t
  misc_feature (1377)..(1379): n is a, c, g, or t
  misc_feature (1382)..(1382): n is a, c, g, or t
  misc_feature (1389)..(1391): n is a, c, g, or t
  misc_feature (1403)..(1403): n is a, c, g, or t
ttagagaaattactatgagaggatcgcatcaccatcaccatcacggatcctatttaggtgacactatagaatcgtcgacccacgcgtccgccagcccccgcgcccgcccgccagcccgcccagcggtcgggtccgggcgcccgcgcagaatcagctgtctgagctgcccaggcggcgggggagcagcgagcgggcttcagcgagccgcaggaggcacaggcctgtcctgggtccccgcaggtctgcgcgtctgttgttcccagcgctctgagaggcctgaaaaggaagagcaacctgtccagaatccccgcaggaaaggaaaaggaggggaaatctcgacatggaaaaactcttcaatgaaaatgaaggaatgccttcgaatcaaggaaagatagacaatgaagaacagccaccgcacgagggaaagccagaagtagcttgtattctggaagacaagaagttagaaaacgagggaaacacagaaaacacgggcaagagagttgaggaaccgttaaaggataaagaaaagccagagagtgcgggaaaggcaaaaggagaaggaaagtcagagaggaagggaaagtcagagatgcagggaggatcaaagacagagggaaagccagagagagggggaagggcagagggtgaaggagagccagacagtgaaagagagccagagagtgagggagagccagaaagtgaaacaagggctgcaggaaagcgcccagctgaggatgatatacccaggaaagccaaaagaaaaaccaacaaggggctggctcagtacctcaagcaatataaggaagccatacatgatatgaatttcagcaatgaggacatgataagagaatttgacancatggctagggtggaggataaaaaggagaaaaagcaaacagaaattgggggcgtttttgtggatgcaaaaaanttncaggaccccttctatcctaggggttcnanggnanttcngggtggctgcagggcccccncgaagggacnctgaanacnttccttatgtgtagtgtccctgncaggcntttntcaggccatntgttttaaccttatggaaatactttgctttaaccgttccncctgctaccnaaaacgttttnacccccntgccnntgtttgcttnctctttttttncntaacaaatttttccncttnncnttncnaaaacctctttntnttggnaaaaataancccctttnatttcaaaaaaaaaaaagggnggccccnccntnnggggncnaataactttttncctgactngnccctntnnaaaatccnaaggncncnaaccctttgnttttttcaaccncgttncccgggntttttttttggaaanccccttttggganttttggcnngngnnnttnggaaaannnggttcccctttntcccggccta

SEQ ID NO: 207 - DNA, 159 bp, Homo Sapiens
gaggtcgcatcaccatcaccatcacggatcctatttaggtgacactatagaatcgtcgacccacgcgtccggcggctgtcgccatgttgtcggtagcagcccgctcgggcccgttcgcgcccgtcctgtcggccacgtcccgcggggtggcgggcgcac

SEQ ID NO: 208 - DNA, 1293 bp, Homo Sapiens
  misc_feature (813)..(813): n is a, c, g, or t
  misc_feature (844)..(844): n is a, c, g, or t
  misc_feature (891)..(891): n is a, c, g, or t
  misc_feature (917)..(917): n is a, c, g, or t
  misc_feature (924)..(924): n is a, c, g, or t
  misc_feature (927)..(927): n is a, c, g, or t
  misc_feature (929)..(929): n is a, c, g, or t
  misc_feature (932)..(932): n is a, c, g, or t
  misc_feature (934)..(934): n is a, c, g, or t
  misc_feature (938)..(938): n is a, c, g, or t
  misc_feature (943)..(944): n is a, c, g, or t
  misc_feature (950)..(950): n is a, c, g, or t
  misc_feature (955)..(955): n is a, c, g, or t
  misc_feature (957)..(957): n is a, c, g, or t
  misc_feature (962)..(962): n is a, c, g, or t
  misc_feature (967)..(967): n is a, c, g, or t
  misc_feature (969)..(969): n is a, c, g, or t
  misc_feature (973)..(973): n is a, c, g, or t
  misc_feature (980)..(980): n is a, c, g, or t
  misc_feature (983)..(983): n is a, c, g, or t
  misc_feature (988)..(988): n is a, c, g, or t
  misc_feature (992)..(992): n is a, c, g, or t
  misc_feature (997)..(999): n is a, c, g, or t
  misc_feature (1003)..(1003): n is a, c, g, or t
  misc_feature (1005)..(1008): n is a, c, g, or t
  misc_feature (1012)..(1012): n is a, c, g, or t
  misc_feature (1014)..(1014): n is a, c, g, or t
  misc_feature (1016)..(1016): n is a, c, g, or t
  misc_feature (1018)..(1018): n is a, c, g, or t
  misc_feature (1026)..(1026): n is a, c, g, or t
  misc_feature (1031)..(1032): n is a, c, g, or t
  misc_feature (1042)..(1045): n is a, c, g, or t
  misc_feature (1060)..(1060): n is a, c, g, or t
  misc_feature (1064)..(1065): n is a, c, g, or t
  misc_feature (1067)..(1069): n is a, c, g, or t
  misc_feature (1073)..(1081): n is a, c, g, or t
  misc_feature (1084)..(1084): n is a, c, g, or t
  misc_feature (1086)..(1087): n is a, c, g, or t
  misc_feature (1090)..(1091): n is a, c, g, or t
  misc_feature (1097)..(1099): n is a, c, g, or t
  misc_feature (1104)..(1106): n is a, c, g, or t
  misc_feature (1112)..(1112): n is a, c, g, or t
  misc_feature (1115)..(1115): n is a, c, g, or t
  misc_feature (1117)..(1118): n is a, c, g, or t
  misc_feature (1122)..(1125): n is a, c, g, or t
  misc_feature (1128)..(1128): n is a, c, g, or t
  misc_feature (1133)..(1134): n is a, c, g, or t
  misc_feature (1136)..(1141): n is a, c, g, or t
  misc_feature (1145)..(1145): n is a, c, g, or t
  misc_feature (1152)..(1159): n is a, c, g, or t
  misc_feature (1164)..(1164): n is a, c, g, or t
  misc_feature (1170)..(1172): n is a, c, g, or t
  misc_feature (1177)..(1177): n is a, c, g, or t
  misc_feature (1179)..(1181): n is a, c, g, or t
  misc_feature (1184)..(1193): n is a, c, g, or t
  misc_feature (1197)..(1203): n is a, c, g, or t
  misc_feature (1207)..(1207): n is a, c, g, or t
  misc_feature (1215)..(1215): n is a, c, g, or t
  misc_feature (1217)..(1225): n is a, c, g, or t
  misc_feature (1228)..(1241): n is a, c, g, or t
  misc_feature (1243)..(1253): n is a, c, g, or t
  misc_feature (1255)..(1255): n is a, c, g, or t
  misc_feature (1258)..(1260): n is a, c, g, or t
  misc_feature (1262)..(1271): n is a, c, g, or t
  misc_feature (1273)..(1288): n is a, c, g, or t
  misc_feature (1291)..(1293): n is a, c, g, or t
tagagaaaattactatgagaggatcgcatcaccatcaccattcacggatcctatttaggtgacactatagaatcgtcgacccacgcgtccgggtgtgttcaccggatcagagatagcagagcgccgagttggggccacgaaggcgtgaggggagtcgtcgtccctcctgcacgaaagcgtctaagccttggcgacgccgccctgggggacccacgtcaggcctgggatagggaccgctgtccccgggtccctaccaatgtcgcccgtcgctcccggcccagctctacccgcagagtctgatggcagcggccactctgaggacgccaactcagggcactgtgacctttgaagatgtggccgtacacttctcctgggaggaatggggtctccttgatgaggctcaaagatgcctgtaccgtgatgtgatgctggagaacttggctcttttaacctctctagatgttcatcatcagaagcagcaccttggagaaaaacatttcagaagcaatgtgggcagagccttgtttgtgaagacctgcacattccatgtgtcaggggagccttccacctgcagagaagttgggaaggacttcctggccaagttgggatttctccatcaacaggctgctcacactggggagcaatcaaatagcaaaagcgacggtggggccatcagtcacagaggaaaaactcattacaactgtggagaacacacaaaagcattcagcggtaaaacacacacttgttcagcagcagagaaccctcactacagaaagatgttacatatgcagtgaatgtgggaaaatcctttancaaaagctacagtctcaatgaccattggaanacttcacactggaaaaaaagcctttatgaatgtccaaaagtgtgggnaagtccttttaggcaaagcctctaantctcatncancnccngnaaantttcnnctgcantaacnancctcntgaangntgangaaatgnggnaaaanttantttannnaacnannnntaancntncntttaaaanattcnnaaaaatttcnnnntggggggaaaaaggnccannannnaatnnnnnnnnnaangnnggnnaaaaannnttttnnnccaaanggntnntggnnnnccnttttnnannnnnngggnaaatttnnnnnnnnggggnaaaaannnccttnannnaannnnnnnnnnaaannnnnnnaaantttttttnannnnnnnnnttnnnnnnnnnnnnnnannnnnnnnnnnanaannntnnnnnnnnnngnnnnnnnnnnnnnnnnttnnn

SEQ ID NO: 209 - DNA, 1200 bp, Homo Sapiens
  misc_feature (965)..(965): n is a, c, g, or t
  misc_feature (977)..(977): n is a, c, g, or t
  misc_feature (985)..(985): n is a, c, g, or t
  misc_feature (990)..(990): n is a, c, g, or t
  misc_feature (992)..(992): n is a, c, g, or t
  misc_feature (1003)..(1003): n is a, c, g, or t
  misc_feature (1065)..(1065): n is a, c, g, or t
  misc_feature (1069)..(1069): n is a, c, g, or t
  misc_feature (1073)..(1073): n is a, c, g, or t
  misc_feature (1091)..(1091): n is a, c, g, or t
  misc_feature (1102)..(1102): n is a, c, g, or t
  misc_feature (1133)..(1133): n is a, c, g, or t
  misc_feature (1139)..(1140): n is a, c, g, or t
  misc_feature (1142)..(1142): n is a, c, g, or t
  misc_feature (1147)..(1147): n is a, c, g, or t
  misc_feature (1169)..(1169): n is a, c, g, or t
tagagagattactatgagaggatcgcatcaccatcaccatcacggatcctatttaggtgacactatagaatcgtcgacccacgcgtccggtgaaggtaatcatcctgcattagctgtggaagacttgggatgtggggtgatacaggtagatgaagataattgtaaggaagaaaaggcacaagtggcaaacaggcctttaaaatgcattgttgaggaaacctatatcgacttgaccacagaatctcccagttcatgtgaagtaaaaaaagatgagttaaaatcagagccaggatcaaattgtgataactcggagttgcctgggactttgcataattctcacaaaaagagaagaaacatttctgatctaaatcatcctcataaaaaacaaagaaaggaaacagacttaactaataaggaaaagaccaagaaacctacccaagattcttgtgagaatactgaagctcaccaaaagaaagccagtaagaagaaggcccctcctgtgactaaagatccctcatcattaaaggcaaccccagggattaaggattcatcagcagcacttgccacttctacaagtctttctgcaaaaaatgttattaaaaagaagggagaaattatcattttatggacaagaaatgatgaccgggaaattttattggagtgtcagaaaagagggccatcatttaaaacatttgcatatttagccgccaagttggataaaaatccaaatcaggtctcagaaagattccagcagctaatgaagctctttgaaaagtcaaaatgcaggtagttaatggttacactacaggagactagtaaaataaatgtttgacactgtagttgtgcagttaatggcctgttagtcattgaagatgtgaatagtgggtgagagacatccagttgagttcctgcttcagtcacaggttggaggatgattgctcgagcaggcatctaaggtgacctcntccccagggacntgctcaantgaancntgctgcagttncaatcaccatggcatctctccccaccttctgattgctgaagagcctagggggggggaatccntttngatnaaaaaaaagttttttaanaaaaatcaaanttcttgaaaaacaaaatggggtttctaaccngggaanncnggganggagggaatttaaggttccccnatttttattagggccaattaaaaacaaaact

SEQ ID NO: 210 - DNA, 1561 bp, Homo Sapiens
  misc_feature (234)..(234): n is a, c, g, or t
  misc_feature (290)..(290): n is a, c, g, or t
  misc_feature (294)..(294): n is a, c, g, or t
  misc_feature (298)..(298): n is a, c, g, or t
  misc_feature (315)..(315): n is a, c, g, or t
  misc_feature (409)..(409): n is a, c, g, or t
  misc_feature (411)..(411): n is a, c, g, or t
  misc_feature (415)..(415): n is a, c, g, or t
  misc_feature (438)..(438): n is a, c, g, or t
  misc_feature (443)..(444): n is a, c, g, or t
  misc_feature (448)..(450): n is a, c, g, or t
  misc_feature (456)..(456): n is a, c, g, or t
  misc_feature (465)..(465): n is a, c, g, or t
  misc_feature (467)..(467): n is a, c, g, or t
  misc_feature (472)..(472): n is a, c, g, or t
  misc_feature (476)..(476): n is a, c, g, or t
  misc_feature (480)..(480): n is a, c, g, or t
  misc_feature (487)..(490): n is a, c, g, or t
  misc_feature (496)..(496): n is a, c, g, or t
  misc_feature (498)..(499): n is a, c, g, or t
  misc_feature (501)..(501): n is a, c, g, or t
  misc_feature (514)..(516): n is a, c, g, or t
  misc_feature (518)..(518): n is a, c, g, or t
  misc_feature (523)..(523): n is a, c, g, or t
  misc_feature (535)..(537): n is a, c, g, or t
  misc_feature (539)..(540): n is a, c, g, or t
  misc_feature (544)..(544): n is a, c, g, or t
  misc_feature (557)..(558): n is a, c, g, or t
  misc_feature (561)..(562): n is a, c, g, or t
  misc_feature (565)..(565): n is a, c, g, or t
  misc_feature (572)..(574): n is a, c, g, or t
  misc_feature (579)..(579): n is a, c, g, or t
  misc_feature (583)..(585): n is a, c, g, or t
  misc_feature (590)..(590): n is a, c, g, or t
  misc_feature (592)..(592): n is a, c, g, or t
  misc_feature (598)..(598): n is a, c, g, or t
  misc_feature (600)..(602): n is a, c, g, or t
  misc_feature (604)..(605): n is a, c, g, or t
  misc_feature (616)..(617): n is a, c, g, or t
  misc_feature (624)..(624): n is a, c, g, or t
  misc_feature (627)..(628): n is a, c, g, or t
  misc_feature (636)..(636): n is a, c, g, or t
  misc_feature (643)..(643): n is a, c, g, or t
  misc_feature (648)..(648): n is a, c, g, or t
  misc_feature (655)..(655): n is a, c, g, or t
  misc_feature (658)..(658): n is a, c, g, or t
  misc_feature (660)..(660): n is a, c, g, or t
  misc_feature (666)..(666): n is a, c, g, or t
  misc_feature (669)..(669): n is a, c, g, or t
  misc_feature (672)..(672): n is a, c, g, or t
  misc_feature (674)..(674): n is a, c, g, or t
  misc_feature (677)..(677): n is a, c, g, or t
  misc_feature (679)..(680): n is a, c, g, or t
  misc_feature (683)..(683): n is a, c, g, or t
  misc_feature (685)..(687): n is a, c, g, or t
  misc_feature (694)..(694): n is a, c, g, or t
  misc_feature (697)..(697): n is a, c, g, or t
  misc_feature (704)..(704): n is a, c, g, or t
  misc_feature (706)..(706): n is a, c, g, or t
  misc_feature (711)..(711): n is a, c, g, or t
  misc_feature (714)..(715): n is a, c, g, or t
  misc_feature (719)..(719): n is a, c, g, or t
  misc_feature (725)..(725): n is a, c, g, or t
  misc_feature (729)..(729): n is a, c, g, or t
  misc_feature (731)..(731): n is a, c, g, or t
  misc_feature (733)..(733): n is a, c, g, or t
  misc_feature (738)..(738): n is a, c, g, or t
  misc_feature (742)..(742): n is a, c, g, or t
  misc_feature (761)..(762): n is a, c, g, or t
  misc_feature (765)..(765): n is a, c, g, or t
  misc_feature (767)..(767): n is a, c, g, or t
  misc_feature (770)..(771): n is a, c, g, or t
  misc_feature (774)..(774): n is a, c, g, or t
  misc_feature (781)..(781): n is a, c, g, or t
  misc_feature (783)..(783): n is a, c, g, or t
  misc_feature (785)..(785): n is a, c, g, or t
  misc_feature (787)..(787): n is a, c, g, or t
  misc_feature (789)..(789): n is a, c, g, or t
  misc_feature (792)..(792): n is a, c, g, or t
  misc_feature (796)..(796): n is a, c, g, or t
  misc_feature (798)..(798): n is a, c, g, or t
  misc_feature (800)..(804): n is a, c, g, or t
  misc_feature (807)..(807): n is a, c, g, or t
  misc_feature (810)..(810): n is a, c, g, or t
  misc_feature (815)..(815): n is a, c, g, or t
  misc_feature (821)..(821): n is a, c, g, or t
  misc_feature (825)..(825): n is a, c, g, or t
  misc_feature (834)..(834): n is a, c, g, or t
  misc_feature (839)..(840): n is a, c, g, or t
  misc_feature (843)..(844): n is a, c, g, or t
  misc_feature (846)..(847): n is a, c, g, or t
  misc_feature (851)..(851): n is a, c, g, or t
  misc_feature (853)..(853): n is a, c, g, or t
  misc_feature (855)..(855): n is a, c, g, or t
  misc_feature (857)..(859): n is a, c, g, or t
  misc_feature (863)..(864): n is a, c, g, or t
  misc_feature (866)..(867): n is a, c, g, or t
  misc_feature (873)..(873): n is a, c, g, or t
  misc_feature (881)..(881): n is a, c, g, or t
  misc_feature (885)..(886): n is a, c, g, or t
  misc_feature (892)..(892): n is a, c, g, or t
  misc_feature (897)..(899): n is a, c, g, or t
  misc_feature (901)..(901): n is a, c, g, or t
  misc_feature (911)..(911): n is a, c, g, or t
  misc_feature (915)..(915): n is a, c, g, or t
  misc_feature (919)..(920): n is a, c, g, or t
  misc_feature (924)..(924): n is a, c, g, or t
  misc_feature (927)..(929): n is a, c, g, or t
  misc_feature (948)..(948): n is a, c, g, or t
  misc_feature (956)..(956): n is a, c, g, or t
  misc_feature (959)..(959): n is a, c, g, or t
  misc_feature (961)..(961): n is a, c, g, or t
  misc_feature (965)..(965): n is a, c, g, or t
  misc_feature (976)..(977): n is a, c, g, or t
  misc_feature (979)..(980): n is a, c, g, or t
  misc_feature (983)..(983): n is a, c, g, or t
  misc_feature (991)..(991): n is a, c, g, or t
  misc_feature (993)..(993): n is a, c, g, or t
  misc_feature (995)..(995): n is a, c, g, or t
  misc_feature (1004)..(1006): n is a, c, g, or t
  misc_feature (1010)..(1010): n is a, c, g, or t
  misc_feature (1012)..(1013): n is a, c, g, or t
  misc_feature (1023)..(1023): n is a, c, g, or t
  misc_feature (1026)..(1027): n is a, c, g, or t
  misc_feature (1029)..(1029): n is a, c, g, or t
  misc_feature (1031)..(1031): n is a, c, g, or t
  misc_feature (1040)..(1041): n is a, c, g, or t
  misc_feature (1043)..(1045): n is a, c, g, or t
  misc_feature (1052)..(1052): n is a, c, g, or t
  misc_feature (1065)..(1065): n is a, c, g, or t
  misc_feature (1067)..(1067): n is a, c, g, or t
  misc_feature (1072)..(1073): n is a, c, g, or t
  misc_feature (1084)..(1084): n is a, c, g, or t
  misc_feature (1091)..(1091): n is a, c, g, or t
  misc_feature (1097)..(1097): n is a, c, g, or t
  misc_feature (1099)..(1101): n is a, c, g, or t
  misc_feature (1103)..(1103): n is a, c, g, or t
  misc_feature (1106)..(1106): n is a, c, g, or t
  misc_feature (1114)..(1114): n is a, c, g, or t
  misc_feature (1118)..(1118): n is a, c, g, or t
  misc_feature (1122)..(1122): n is a, c, g, or t
  misc_feature (1128)..(1131): n is a, c, g, or t
  misc_feature (1133)..(1133): n is a, c, g, or t
  misc_feature (1139)..(1140): n is a, c, g, or t
  misc_feature (1143)..(1143): n is a, c, g, or t
  misc_feature (1148)..(1148): n is a, c, g, or t
  misc_feature (1151)..(1153): n is a, c, g, or t
  misc_feature (1160)..(1160): n is a, c, g, or t
  misc_feature (1163)..(1163): n is a, c, g, or t
  misc_feature (1167)..(1167): n is a, c, g, or t
  misc_feature (1169)..(1169): n is a, c, g, or t
  misc_feature (1173)..(1175): n is a, c, g, or t
  misc_feature (1180)..(1180): n is a, c, g, or t
  misc_feature (1182)..(1183): n is a, c, g, or t
  misc_feature (1186)..(1186): n is a, c, g, or t
  misc_feature (1198)..(1198): n is a, c, g, or t
  misc_feature (1200)..(1203): n is a, c, g, or t
  misc_feature (1211)..(1211): n is a, c, g, or t
  misc_feature (1213)..(1213): n is a, c, g, or t
  misc_feature (1217)..(1217): n is a, c, g, or t
  misc_feature (1221)..(1222): n is a, c, g, or t
  misc_feature (1224)..(1225): n is a, c, g, or t
  misc_feature (1231)..(1233): n is a, c, g, or t
  misc_feature (1239)..(1239): n is a, c, g, or t
  misc_feature (1241)..(1241): n is a, c, g, or t
  misc_feature (1253)..(1253): n is a, c, g, or t
  misc_feature (1255)..(1255): n is a, c, g, or t
  misc_feature (1263)..(1264): n is a, c, g, or t
  misc_feature (1267)..(1267): n is a, c, g, or t
  misc_feature (1269)..(1271): n is a, c, g, or t
  misc_feature (1275)..(1275): n is a, c, g, or t
  misc_feature (1279)..(1279): n is a, c, g, or t
  misc_feature (1281)..(1281): n is a, c, g, or t
  misc_feature (1283)..(1284): n is a, c, g, or t
  misc_feature (1286)..(1286): n is a, c, g, or t
  misc_feature (1291)..(1292): n is a, c, g, or t
  misc_feature (1294)..(1294): n is a, c, g, or t
  misc_feature (1296)..(1296): n is a, c, g, or t
  misc_feature (1298)..(1298): n is a, c, g, or t
  misc_feature (1306)..(1306): n is a, c, g, or t
  misc_feature (1309)..(1310): n is a, c, g, or t
  misc_feature (1313)..(1313): n is a, c, g, or t
  misc_feature (1315)..(1315): n is a, c, g, or t
  misc_feature (1323)..(1325): n is a, c, g, or t
  misc_feature (1331)..(1332): n is a, c, g, or t
  misc_feature (1336)..(1336): n is a, c, g, or t
  misc_feature (1340)..(1340): n is a, c, g, or t
  misc_feature (1345)..(1345): n is a, c, g, or t
  misc_feature (1347)..(1347): n is a, c, g, or t
  misc_feature (1366)..(1366): n is a, c, g, or t
  misc_feature (1371)..(1371): n is a, c, g, or t
  misc_feature (1375)..(1375): n is a, c, g, or t
  misc_feature (1379)..(1384): n is a, c, g, or t
  misc_feature (1386)..(1386): n is a, c, g, or t
  misc_feature (1392)..(1392): n is a, c, g, or t
  misc_feature (1398)..(1398): n is a, c, g, or t
  misc_feature (1402)..(1403): n is a, c, g, or t
  misc_feature (1406)..(1406): n is a, c, g, or t
  misc_feature (1409)..(1409): n is a, c, g, or t
  misc_feature (1411)..(1412): n is a, c, g, or t
  misc_feature (1415)..(1415): n is a, c, g, or t
  misc_feature (1428)..(1428): n is a, c, g, or t
  misc_feature (1434)..(1434): n is a, c, g, or t
  misc_feature (1436)..(1439): n is a, c, g, or t
  misc_feature (1441)..(1442): n is a, c, g, or t
  misc_feature (1444)..(1444): n is a, c, g, or t
  misc_feature (1446)..(1446): n is a, c, g, or t
  misc_feature (1457)..(1457): n is a, c, g, or t
  misc_feature (1462)..(1462): n is a, c, g, or t
  misc_feature (1465)..(1465): n is a, c, g, or t
  misc_feature (1467)..(1468): n is a, c, g, or t
  misc_feature (1471)..(1471): n is a, c, g, or t
  misc_feature (1473)..(1473): n is a, c, g, or t
  misc_feature (1476)..(1476): n is a, c, g, or t
  misc_feature (1480)..(1480): n is a, c, g, or t
  misc_feature (1482)..(1482): n is a, c, g, or t
  misc_feature (1489)..(1489): n is a, c, g, or t
  misc_feature (1498)..(1498): n is a, c, g, or t
  misc_feature (1500)..(1501): n is a, c, g, or t
  misc_feature (1503)..(1504): n is a, c, g, or t
  misc_feature (1510)..(1510): n is a, c, g, or t
  misc_feature (1513)..(1513): n is a, c, g, or t
  misc_feature (1520)..(1520): n is a, c, g, or t
  misc_feature (1529)..(1529): n is a, c, g, or t
  misc_feature (1531)..(1531): n is a, c, g, or t
  misc_feature (1533)..(1533): n is a, c, g, or t
  misc_feature (1535)..(1535): n is a, c, g, or t
  misc_feature (1537)..(1537): n is a, c, g, or t
  misc_feature (1542)..(1542): n is a, c, g, or t
  misc_feature (1548)..(1548): n is a, c, g, or t
  misc_feature (1554)..(1554): n is a, c, g, or t
  misc_feature (1558)..(1558): n is a, c, g, or t
tgaatagagagaattactatgagaggatcgcatcaccatcaccatcacgggatcctatttaggtgacactatagaatcgtcgacccacgcgtccgcggacgcgtgggggagcatcccctgtccctgtgtgagcaggtggcccccatcattgacctcatggccgtcagcaatgcgctttttgccaagctccgggacttcatcaccctgcgtctgcctcctggcttcccagttaanattgaaatcccgatcttccacatcctcaacgcccgcatcaccttcgggaacctcancggntgcnacgaaccggtgccatcngtgcgaggcagccccagcagcgagacgccttccccaggcagcgactcctccagcgtcagcagctccagctccacgacctcctgccgcggctgcnanatcnccccagcgttgttcgaggccccncgcgnntacnnncatgangggctggcnancgggnggcngtanacccggnnnnacaaanannancctgctgcaattnnnanatctngaagagcctgcnnnannacgnttagagagtattnnccnnaanaaaaatnnnaggancgcnnntaaananaagttnannncnnaggaaataacnnctcatgntanntaaagaangttatcnatcanggactantcncnaatgtncanctngnganannaanannnaaccctnccnagaaaangntcatnttnntttncaaaanttananancatantcgntaaaacccataagaaagcnnatnancanncgnaaacccncntntntntcnaaananannnnnatnagnccatncactanttanccctttcanagttnnaannannaaangnantnnncttnnanncatttnccaactcngatnnataaanttatnnnantataaccaanaaantttnnaacnctnnnatatcgcataaaacaccanccacccanatnanaaanataatttttannanncanaatttctntnancaaaaaacnnnttananncttctttaanganncnanacttgattnnannngtaaaanatattcaacaaantnttttnnttcacctatanaaataantgtaanannnanaantataattnaaanatantgaatnnnnantcttcnncanctcanacnnntaaaaanctntaananctannncttanannctnctataaatatangnnnnatatgatntnaatnatcnnannacttannnattatnancatattagagtncnataaatannctnannnacanaaantntnncntgaanntnantnaataattntgnntanantcaactannnggaatnnatantttnttctnanaccaaataaattaaataanattcncgcncttnnnnnntnaatcanctattntaanntcnttngnnttnaattattaaatanctcttnannnnannantntcataaaatantccanttntnnctntnaantcanancagaatnatcattatnanntnngatatnatnttgttanatcttaatnangntnanccaanctctcnataatnttgnctt

SEQ ID NO: 211 - DNA, 1392 bp, Homo Sapiens
  misc_feature (826)..(826): n is a, c, g, or t
  misc_feature (852)..(852): n is a, c, g, or t
  misc_feature (854)..(854): n is a, c, g, or t
  misc_feature (877)..(877): n is a, c, g, or t
  misc_feature (880)..(880): n is a, c, g, or t
  misc_feature (901)..(901): n is a, c, g, or t
  misc_feature (948)..(948): n is a, c, g, or t
  misc_feature (974)..(974): n is a, c, g, or t
  misc_feature (986)..(986): n is a, c, g, or t
  misc_feature (997)..(997): n is a, c, g, or t
  misc_feature (1007)..(1007): n is a, c, g, or t
  misc_feature (1011)..(1011): n is a, c, g, or t
  misc_feature (1013)..(1013): n is a, c, g, or t
  misc_feature (1020)..(1020): n is a, c, g, or t
  misc_feature (1023)..(1023): n is a, c, g, or t
  misc_feature (1031)..(1031): n is a, c, g, or t
  misc_feature (1054)..(1054): n is a, c, g, or t
  misc_feature (1056)..(1056): n is a, c, g, or t
  misc_feature (1062)..(1062): n is a, c, g, or t
  misc_feature (1064)..(1065): n is a, c, g, or t
  misc_feature (1080)..(1081): n is a, c, g, or t
  misc_feature (1089)..(1089): n is a, c, g, or t
  misc_feature (1093)..(1093): n is a, c, g, or t
  misc_feature (1098)..(1099): n is a, c, g, or t
  misc_feature (1112)..(1113): n is a, c, g, or t
  misc_feature (1129)..(1129): n is a, c, g, or t
  misc_feature (1137)..(1137): n is a, c, g, or t
  misc_feature (1139)..(1139): n is a, c, g, or t
  misc_feature (1147)..(1147): n is a, c, g, or t
  misc_feature (1151)..(1151): n is a, c, g, or t
  misc_feature (1154)..(1154): n is a, c, g, or t
  misc_feature (1156)..(1156): n is a, c, g, or t
  misc_feature (1165)..(1165): n is a, c, g, or t
  misc_feature (1171)..(1171): n is a, c, g, or t
  misc_feature (1190)..(1190): n is a, c, g, or t
  misc_feature (1199)..(1199): n is a, c, g, or t
  misc_feature (1204)..(1205): n is a, c, g, or t
  misc_feature (1212)..(1213): n is a, c, g, or t
  misc_feature (1222)..(1222): n is a, c, g, or t
  misc_feature (1240)..(1241): n is a, c, g, or t
  misc_feature (1248)..(1248): n is a, c, g, or t
  misc_feature (1256)..(1256): n is a, c, g, or t
  misc_feature (1259)..(1259): n is a, c, g, or t
  misc_feature (1272)..(1273): n is a, c, g, or t
  misc_feature (1280)..(1280): n is a, c, g, or t
  misc_feature (1282)..(1283): n is a, c, g, or t
  misc_feature (1289)..(1291): n is a, c, g, or t
  misc_feature (1294)..(1295): n is a, c, g, or t
  misc_feature (1297)..(1300): n is a, c, g, or t
  misc_feature (1304)..(1316): n is a, c, g, or t
  misc_feature (1318)..(1322): n is a, c, g, or t
  misc_feature (1325)..(1325): n is a, c, g, or t
  misc_feature (1329)..(1331): n is a, c, g, or t
  misc_feature (1333)..(1337): n is a, c, g, or t
  misc_feature (1342)..(1342): n is a, c, g, or t
  misc_feature (1346)..(1348): n is a, c, g, or t
  misc_feature (1356)..(1358): n is a, c, g, or t
  misc_feature (1363)..(1364): n is a, c, g, or t
  misc_feature (1373)..(1373): n is a, c, g, or t
  misc_feature (1380)..(1381): n is a, c, g, or t
  misc_feature (1383)..(1383): n is a, c, g, or t
  misc_feature (1385)..(1386): n is a, c, g, or t
  misc_feature (1392)..(1392): n is a, c, g, or t
tagagaaattactatgagaggatcgcatcaccatcaccatcacggatcctatttaggtgacactatagaatcgtcgacccacgcgtccgcttcagcagcaagagcagcagctccagcaactccagcagctcctggcctccccgcagctgaccccggaacaccagactgttgtctaccagatgatccagcagatccagcagaaacgggagctgcagcgcctgcagatggctgggggctcccagctgcccatggccagcctgctggcaggaagctccaccccgctgctgtctgcgggtacccctggcctgctgcccacagcgtctgctccacccctgctgcccgctggagccctagtggctccctcgcttggcaacaacacaagtctcatggccgcagcagctgcagctgcagcagtagcagcagcaggcggacctccagtcctcactgcccagaccaaccccttcctcagcctgtcgggagcagagggcagtggcggtggccccaaaggagggaccgctgacaaaggagcctcagccaaccaggaaaaaggctaaatccacccttacccctcctgacccccccaagtggagggaacagatcctggcctgaggggtcctagcctggagcaggcgcctgcgcccagaccctggagagccttgacccagagcctgtgctgaggtccagggagtgtggagagctcctggtgtcgaggactgagactgagaggggagccccctccatctggcccccttccctttccgcactgtccgctttgtgaggctcagaggaaggacagtctgcaagcccgcctaggaggtccatcccnagcaaatgttttggaggtccccccananagcaaagtgggccatggcaaaantanggggttggttggacctgtcanatgaaaatggatcagcactttgaatgggaaaaattggaaggaaaagnccttggcctgtccctgcggggaaatnttttatggaaanaagggctggancccactttanctgnanttttttnccnacttgggnaaaatggaaaaaggaacccttgnantttttntnncatcccccccccagnnaaggggcnaaanttgannttttaaaaacccnnaaattttgggggctgnaaaagggnangaaaaaantaanttnancccagcctnttaaanttttgggccccttaaaggnaaaaaaggnaaggnngggaaanntttgccttntttgggcccccctttttnncaattgnaaataaangcnaaaggggaaaaannccccccnanntaaggnnngcnnannnngtgnnnnnnnnnnnnntnnnnnttncccnnnannnnnagggnaaannnttaaaaannnaaaannccctttttncccccanntntnngggggn

SEQ ID NO: 212 - DNA, 1392 bp, Homo Sapiens
  misc_feature (904)..(904): n is a, c, g, or t
  misc_feature (920)..(920): n is a, c, g, or t
  misc_feature (932)..(932): n is a, c, g, or t
  misc_feature (935)..(935): n is a, c, g, or t
  misc_feature (940)..(940): n is a, c, g, or t
  misc_feature (954)..(954): n is a, c, g, or t
  misc_feature (959)..(959): n is a, c, g, or t
  misc_feature (971)..(971): n is a, c, g, or t
  misc_feature (984)..(984): n is a, c, g, or t
  misc_feature (994)..(994): n is a, c, g, or t
  misc_feature (998)..(998): n is a, c, g, or t
  misc_feature (1013)..(1013): n is a, c, g, or t
  misc_feature (1018)..(1018): n is a, c, g, or t
  misc_feature (1029)..(1029): n is a, c, g, or t
  misc_feature (1031)..(1031): n is a, c, g, or t
  misc_feature (1041)..(1041): n is a, c, g, or t
  misc_feature (1046)..(1046): n is a, c, g, or t
  misc_feature (1062)..(1063): n is a, c, g, or t
  misc_feature (1066)..(1066): n is a, c, g, or t
  misc_feature (1071)..(1071): n is a, c, g, or t
  misc_feature (1073)..(1073): n is a, c, g, or t
  misc_feature (1075)..(1075): n is a, c, g, or t
  misc_feature (1086)..(1086): n is a, c, g, or t
  misc_feature (1093)..(1093): n is a, c, g, or t
  misc_feature (1096)..(1096): n is a, c, g, or t
  misc_feature (1111)..(1111): n is a, c, g, or t
  misc_feature (1113)..(1113): n is a, c, g, or t
  misc_feature (1115)..(1115): n is a, c, g, or t
  misc_feature (1119)..(1120): n is a, c, g, or t
  misc_feature (1130)..(1130): n is a, c, g, or t
  misc_feature (1135)..(1135): n is a, c, g, or t
  misc_feature (1139)..(1139): n is a, c, g, or t
  misc_feature (1141)..(1143): n is a, c, g, or t
  misc_feature (1145)..(1146): n is a, c, g, or t
  misc_feature (1154)..(1154): n is a, c, g, or t
  misc_feature (1158)..(1158): n is a, c, g, or t
  misc_feature (1160)..(1160): n is a, c, g, or t
  misc_feature (1169)..(1170): n is a, c, g, or t
  misc_feature (1182)..(1183): n is a, c, g, or t
  misc_feature (1189)..(1189): n is a, c, g, or t
  misc_feature (1204)..(1204): n is a, c, g, or t
  misc_feature (1207)..(1207): n is a, c, g, or t
  misc_feature (1211)..(1211): n is a, c, g, or t
  misc_feature (1213)..(1213): n is a, c, g, or t
  misc_feature (1216)..(1216): n is a, c, g, or t
  misc_feature (1220)..(1220): n is a, c, g, or t
  misc_feature (1223)..(1223): n is a, c, g, or t
  misc_feature (1230)..(1231): n is a, c, g, or t
  misc_feature (1238)..(1238): n is a, c, g, or t
  misc_feature (1242)..(1243): n is a, c, g, or t
  misc_feature (1247)..(1247): n is a, c, g, or t
  misc_feature (1249)..(1249): n is a, c, g, or t
  misc_feature (1254)..(1255): n is a, c, g, or t
  misc_feature (1258)..(1258): n is a, c, g, or t
  misc_feature (1268)..(1268): n is a, c, g, or t
  misc_feature (1274)..(1276): n is a, c, g, or t
  misc_feature (1279)..(1281): n is a, c, g, or t
  misc_feature (1284)..(1288): n is a, c, g, or t
  misc_feature (1290)..(1291): n is a, c, g, or t
  misc_feature (1298)..(1305): n is a, c, g, or t
  misc_feature (1311)..(1311): n is a, c, g, or t
  misc_feature (1321)..(1321): n is a, c, g, or t
  misc_feature (1324)..(1326): n is a, c, g, or t
  misc_feature (1328)..(1329): n is a, c, g, or t
  misc_feature (1336)..(1336): n is a, c, g, or t
  misc_feature (1341)..(1341): n is a, c, g, or t
  misc_feature (1343)..(1344): n is a, c, g, or t
  misc_feature (1348)..(1350): n is a, c, g, or t
  misc_feature (1353)..(1358): n is a, c, g, or t
  misc_feature (1360)..(1367): n is a, c, g, or t
  misc_feature (1369)..(1373): n is a, c, g, or t
  misc_feature (1377)..(1377): n is a, c, g, or t
  misc_feature (1387)..(1390): n is a, c, g, or t
  misc_feature (1392)..(1392): n is a, c, g, or t
atttagagatattactatgagaggatcgcatcaccatcaccatcacggatcctatttaggtgacactatagaatcgtcgacccacgcgtccgatgagcgttacaagaatgagtgccgggagaaggaacgtgaggagattgccagacaggcagccaagatggccgatgaagccatcctgcaggaaagagagagaggaggccctgaggagggagtgcgtgggggccaccctccagccatccagagcctcatcaacctgctggcagacaacaggtacctcactgctgaagagactgacaagatcatcaactacctgcgagagcggaaggagcggctgatgaggagcagcaccgactctctgcctggcccgatttcccgccaaccactcggggcgacctcgggtgcctcgctgaagacacagccaagctcccaaccgctccagagcggccaagtgctcccctctgctacacccactccatctgcaccccccacctcccagcaagagcttcaggccaaaatcctcagcctcttcaatagtggcacagtgacggccaatagcagctctgcatccccctcggttgctgccggaaacaccccaaaccagaatttttccacagcagcaaacagccagcctcaacaaagatcacaggcttctggcaatcagcctccaagcattttgggacagggaggatctgctcagaacatgggccccagacctggggctccttcccaagggctttttggccagccttccagtcgcctggcacctgctagcaacatgactagccagaggcctgtgtcttccacaggtatcaactttgacaatccaagtgtacagaaggctctggataccctgatccagagtggccctgctctctcccacctggttagccagaccacagcacanatggggcagccacagnccccatgggatnttnaccanaggcattactgaanctaantctttcaatttnccccagtcccctnttcccctggnctcntcccatttattgttntaaanaaaactggttngnagaatttttntttgngcttcccaggccgggnntcnagtgncntnaatttttaacnactggtnttnttttttgcccaaggntngngttnntttttccttnaaaantttnannngnntttggggncggnanctttttttnntttttggttttnnaaaaanaaattctccgggggnaanaaangngtngggnttntttttanngggtttncccnncccngnttttnnggntttggacccncccccnnnccnnnttnnnnngnnttttttnnnnnnnncccccntttttttttnaannnanngtttttnttttnanntttnnnaannnnnncnnnnnnnncnnnnnaaanaaaaaaaaannnntn

SEQ ID NO: 213 - DNA, 989 bp, Homo Sapiens
aattaactatgagaggtcgcatcaccatcaccatcacggatcctatttaggtgacactatagaatcgtcgacccacgcgtccgcccacgcgtccggcggcggcggcggcggcgggagcgggagcgggcggcgagtggggagcggggccgggagtggagcagccgccgcggcgggactggaccgagcctcgccggcgcgcacctgcccgcagcgcccgcggagcgcgcagcgcggcccgagcgcgacgacctgccgagcggcggccgaggcggcggtgtgggcgcgtcaggccgcgacgagggcgctgagatctcacattcttgaaggtggcattgaagagcactaagatcggaagatgagtgagcttgaccagttacggcaggaggccgagcaacttaagaaccagattcgagacgccaggaaagcatgtgcagatgcaactctctctcagatcacaaacaacatcgacccagtgggaagaatccaaatgcgcacgaggaggacactgcgggggcacctggccaagatctacgccatgcactggggcacagactccaggcttctcgtcagtgcctcgcaggatggtaaacttatcatctgggacagctacaccaccaacaaggtccacgccatccctctgcgctcctcctgggtcatgacctgtgcatatgccccttctgggaactatgtggcctgcggtggcctggataacatttgctccatttacaatctgaaaactcgtgaggggaacgtgcgcgtgagtcgtgagctggcaggacacacaggttacctgtcctgctgccgattcctggatgacaatcagatcgtcaccagctctggagacaccacgtgtgccctgtgggacatcgagaccggccagcagacgaccacgtttaccggacacactggagatgtcatgagcctttctcttgctcctgacaccagactgttcgtctctggtgcttgtgatgcttcagccaaactctgga

SEQ ID NO: 214 - DNA, 1367 bp, Homo Sapiens
  misc_feature (2)..(2): n is a, c, g, or t
  misc_feature (932)..(932): n is a, c, g, or t
  misc_feature (968)..(968): n is a, c, g, or t
  misc_feature (985)..(985): n is a, c, g, or t
  misc_feature (987)..(987): n is a, c, g, or t
  misc_feature (990)..(990): n is a, c, g, or t
  misc_feature (1003)..(1003): n is a, c, g, or t
  misc_feature (1017)..(1017): n is a, c, g, or t
  misc_feature (1022)..(1022): n is a, c, g, or t
  misc_feature (1030)..(1031): n is a, c, g, or t
  misc_feature (1043)..(1046): n is a, c, g, or t
  misc_feature (1049)..(1050): n is a, c, g, or t
  misc_feature (1052)..(1119): n is a, c, g, or t
  misc_feature (1122)..(1161): n is a, c, g, or t
  misc_feature (1166)..(1167): n is a, c, g, or t
  misc_feature (1174)..(1176): n is a, c, g, or t
  misc_feature (1178)..(1182): n is a, c, g, or t
  misc_feature (1187)..(1187): n is a, c, g, or t
  misc_feature (1189)..(1189): n is a, c, g, or t
  misc_feature (1197)..(1202): n is a, c, g, or t
  misc_feature (1206)..(1207): n is a, c, g, or t
  misc_feature (1210)..(1212): n is a, c, g, or t
  misc_feature (1214)..(1218): n is a, c, g, or t
  misc_feature (1223)..(1226): n is a, c, g, or t
  misc_feature (1228)..(1228): n is a, c, g, or t
  misc_feature (1230)..(1230): n is a, c, g, or t
  misc_feature (1232)..(1234): n is a, c, g, or t
  misc_feature (1239)..(1239): n is a, c, g, or t
  misc_feature (1243)..(1244): n is a, c, g, or t
  misc_feature (1250)..(1251): n is a, c, g, or t
  misc_feature (1253)..(1254): n is a, c, g, or t
  misc_feature (1256)..(1256): n is a, c, g, or t
  misc_feature (1263)..(1265): n is a, c, g, or t
  misc_feature (1269)..(1269): n is a, c, g, or t
  misc_feature (1271)..(1274): n is a, c, g, or t
  misc_feature (1278)..(1278): n is a, c, g, or t
  misc_feature (1280)..(1281): n is a, c, g, or t
  misc_feature (1286)..(1299): n is a, c, g, or t
  misc_feature (1305)..(1308): n is a, c, g, or t
  misc_feature (1311)..(1312): n is a, c, g, or t
  misc_feature (1315)..(1316): n is a, c, g, or t
  misc_feature (1319)..(1320): n is a, c, g, or t
  misc_feature (1324)..(1329): n is a, c, g, or t
  misc_feature (1332)..(1332): n is a, c, g, or t
  misc_feature (1348)..(1349): n is a, c, g, or t
  misc_feature (1356)..(1359): n is a, c, g, or t
  misc_feature (1367)..(1367): n is a, c, g, or t
antagagaaattactatgagaggatcgcatcaccatcaccatcacggatcctatttaggtgacactatagaatcgtcgacccacgcgtccgagtcggccgagctggcgcgcccggagcacctgcgccccggggagggcggcgactgctgcctgcggggagaggcgaggcggccgtggttctgcggggtggatgtgtttcgtgaagacctctgtaccaagacagagaacctgctcgggagctatttccccaagaagatttctgagctggatgcatttttaaaggagccagctctcaatgaagccaacttgagcaatctgaaggccccattggacatcccagtgcctgatccagtcaaggagaaagagaaagaggagcggaagaaacagcaggagaaggaagacaaggatgaaaagaagaagggggaggatgaagacaaaggtcctccctgtggcccagtgaactgcaatgaaaagatcgtggtccttctgcagcgcttgaagcctgagatcaaggatgtcattgagcagctcaacctggtcaccacctggttgcagctgcagatacctcggattgaggatggtaacaattttggagtggctgtccaggagaaggtgtttgagctgatgaccagcctccacaccaagctagaaggcttccacactcaaatctctaagtatttctctgagcgtggtgatgcagtgactaaagcagccaagcagccccatgtgggtgattatcggcagctggtgcacgagctggatgaggcagagtaccgggacatccggctgatggtcatggagatccgcaatgcttatgctgtgttatatgacatcatcctgaagaacttcgagaagctcaagaagcccaggggagaaacaaagggaatgatctattgagagccctctctcccattctgtgatgagtacagcanagaccttcctgctttttactggggactccaaatttncccaaacttgcttctgntnganatttttcccctcnccttgcctctcagncacantaaatttnntttttccccttnnnnaannannnnnnnnnnnnnnnnnnnnnnnnnnnnnnnnnnnnnnnnnnnnnnnnnnnnnnnnnnnnnnnnnnnnccnnnnnnnnnnnnnnnnnnnnnnnnnnnnnnnnnnnnnnnnggggnnccccccnnngnnnnnaaaancntttttttnnnnnncccnnttnnncnnnnnttttnnnnancncnnnttttnaaanntttttnncnngnttttttnnnaaancnnnntttncnnttttnnnnnnnnnnnnnnaaaatnnnnttnnccnnttnntccnnnnnnaanattttttttttttttnnaaaaaannnntttttttn

SEQ ID NO: 215 - DNA, 1405 bp, Homo Sapiens
  misc_feature (894)..(894): n is a, c, g, or t
  misc_feature (926)..(926): n is a, c, g, or t
  misc_feature (960)..(960): n is a, c, g, or t
  misc_feature (964)..(964): n is a, c, g, or t
  misc_feature (994)..(994): n is a, c, g, or t
  misc_feature (1001)..(1001): n is a, c, g, or t
  misc_feature (1012)..(1012): n is a, c, g, or t
  misc_feature (1020)..(1020): n is a, c, g, or t
  misc_feature (1032)..(1032): n is a, c, g, or t
  misc_feature (1034)..(1034): n is a, c, g, or t
  misc_feature (1036)..(1036): n is a, c, g, or t
  misc_feature (1038)..(1038): n is a, c, g, or t
  misc_feature (1049)..(1049): n is a, c, g, or t
  misc_feature (1051)..(1051): n is a, c, g, or t
  misc_feature (1068)..(1068): n is a, c, g, or t
  misc_feature (1072)..(1072): n is a, c, g, or t
  misc_feature (1086)..(1086): n is a, c, g, or t
  misc_feature (1092)..(1093): n is a, c, g, or t
  misc_feature (1095)..(1095): n is a, c, g, or t
  misc_feature (1103)..(1103): n is a, c, g, or t
  misc_feature (1105)..(1105): n is a, c, g, or t
  misc_feature (1122)..(1123): n is a, c, g, or t
  misc_feature (1125)..(1126): n is a, c, g, or t
  misc_feature (1129)..(1129): n is a, c, g, or t
  misc_feature (1137)..(1137): n is a, c, g, or t
  misc_feature (1167)..(1167): n is a, c, g, or t
  misc_feature (1171)..(1171): n is a, c, g, or t
  misc_feature (1176)..(1176): n is a, c, g, or t
  misc_feature (1184)..(1184): n is a, c, g, or t
  misc_feature (1193)..(1193): n is a, c, g, or t
  misc_feature (1211)..(1211): n is a, c, g, or t
  misc_feature (1213)..(1213): n is a, c, g, or t
  misc_feature (1216)..(1216): n is a, c, g, or t
  misc_feature (1218)..(1218): n is a, c, g, or t
  misc_feature (1228)..(1228): n is a, c, g, or t
  misc_feature (1236)..(1236): n is a, c, g, or t
  misc_feature (1240)..(1240): n is a, c, g, or t
  misc_feature (1264)..(1264): n is a, c, g, or t
  misc_feature (1266)..(1266): n is a, c, g, or t
  misc_feature (1285)..(1285): n is a, c, g, or t
  misc_feature (1294)..(1294): n is a, c, g, or t
  misc_feature (1298)..(1303): n is a, c, g, or t
  misc_feature (1308)..(1308): n is a, c, g, or t
  misc_feature (1322)..(1322): n is a, c, g, or t
  misc_feature (1324)..(1324): n is a, c, g, or t
  misc_feature (1327)..(1327): n is a, c, g, or t
  misc_feature (1333)..(1333): n is a, c, g, or t
  misc_feature (1336)..(1336): n is a, c, g, or t
  misc_feature (1371)..(1372): n is a, c, g, or t
  misc_feature (1382)..(1382): n is a, c, g, or t
  misc_feature (1385)..(1385): n is a, c, g, or t
  misc_feature (1391)..(1391): n is a, c, g, or t
  misc_feature (1398)..(1398): n is a, c, g, or t
aattagagagattactatgagaggatcgcatcaccatcaccatcacggatcctatttaggtgacactatagaatcgtcgacccacgcgtccgcaatatttgattatggaaatatttcaggcaccagaagttttgcagatgagaacaatgttttccatgaccctgttgatggttatccttcccttcaagtggaactggaaacccccacagggttgcactacacaccacctacccctttccagcaagatgattattttagtgatatctctagcatagaatctccccttagaacccctagtagactgagtgatgggctagtgccttcccaggggaacatagagcattccgcagatggacctccagtcgtaactgcagaagacgcttccttagaagacagcaaactggaagactcagtgcctttaacagaaatgcctgaagcagtggatgtagatgagagccagttggagaatgtatgtctgagtgagtatcctcaataccttggaaatttggctgggtccccaaaagatgttaaaccagcagagcctagaaaactaggagtaagctctgagcagcaggagaaaggaaaatctggtcctgatgaggagatgatggaagagaaactcaaatctctatttgaggacattcaacttgaagaaggagtagagtctgaggagatgacagaagaaaaagtacaggctattcttaagcgtgttcagcaagcagaactggaaatgtcttcaattacaggttggcagaatgagacatcaagtggaaacctagagtcctgcgctcaagctcgaagagtaactggtgggttactagatcgactggatgacagccctgaccagtgtagagattcccattacctcatatctcaaaggagaagctggcaaantttgaagcaaatggaagccatacagaaaatcnctccagaaagcaaagacaaaatcttactttccanaatncccaaaatgatgtaggaaaacagagtaccnagggaanctctgaaaccnaaaatacntgggatctgggncngntngaaaaacccgncntcccccctagccgcttntccnaaattctctaaaanaaaccnncnagctttananaaaaaaaactaaacccnngnnggnccggtccntatgaaaaaaaggattaggacttccccccnaaanggcangccagggnttacccccntgaaaaaaaaggggtccngnggncngaacaaaccngggaaagntttnaaggggaaacaaaaaaaaaacccncnggggaaaaaaaaccccctnaaaaggaangggnnnnnnggaanaaattttttcgccnantgnaaatcnggnaaaagttcccggaaaaaattcccgaaggggggggnncccccccccnaangggggnttttttnaaaaaaa

SEQ ID NO: 216 - DNA, 1355 bp, Homo Sapiens
  misc_feature (836)..(836): n is a, c, g, or t
  misc_feature (839)..(839): n is a, c, g, or t
  misc_feature (870)..(870): n is a, c, g, or t
  misc_feature (914)..(914): n is a, c, g, or t
  misc_feature (962)..(962): n is a, c, g, or t
  misc_feature (987)..(987): n is a, c, g, or t
  misc_feature (990)..(990): n is a, c, g, or t
  misc_feature (992)..(992): n is a, c, g, or t
  misc_feature (1022)..(1022): n is a, c, g, or t
  misc_feature (1044)..(1044): n is a, c, g, or t
  misc_feature (1048)..(1048): n is a, c, g, or t
  misc_feature (1052)..(1052): n is a, c, g, or t
  misc_feature (1055)..(1055): n is a, c, g, or t
  misc_feature (1060)..(1060): n is a, c, g, or t
  misc_feature (1071)..(1071): n is a, c, g, or t
  misc_feature (1085)..(1085): n is a, c, g, or t
  misc_feature (1088)..(1088): n is a, c, g, or t
  misc_feature (1091)..(1091): n is a, c, g, or t
  misc_feature (1095)..(1095): n is a, c, g, or t
  misc_feature (1106)..(1106): n is a, c, g, or t
  misc_feature (1115)..(1115): n is a, c, g, or t
  misc_feature (1119)..(1119): n is a, c, g, or t
  misc_feature (1129)..(1129): n is a, c, g, or t
  misc_feature (1139)..(1139): n is a, c, g, or t
  misc_feature (1148)..(1148): n is a, c, g, or t
  misc_feature (1150)..(1150): n is a, c, g, or t
  misc_feature (1160)..(1160): n is a, c, g, or t
  misc_feature (1162)..(1162): n is a, c, g, or t
  misc_feature (1177)..(1177): n is a, c, g, or t
  misc_feature (1180)..(1180): n is a, c, g, or t
  misc_feature (1200)..(1264): n is a, c, g, or t
  misc_feature (1269)..(1271): n is a, c, g, or t
  misc_feature (1277)..(1278): n is a, c, g, or t
  misc_feature (1283)..(1284): n is a, c, g, or t
  misc_feature (1288)..(1288): n is a, c, g, or t
  misc_feature (1294)..(1296): n is a, c, g, or t
  misc_feature (1298)..(1298): n is a, c, g, or t
  misc_feature (1301)..(1302): n is a, c, g, or t
  misc_feature (1305)..(1306): n is a, c, g, or t
  misc_feature (1313)..(1315): n is a, c, g, or t
  misc_feature (1322)..(1322): n is a, c, g, or t
  misc_feature (1324)..(1324): n is a, c, g, or t
  misc_feature (1328)..(1330): n is a, c, g, or t
  misc_feature (1336)..(1336): n is a, c, g, or t
  misc_feature (1339)..(1340): n is a, c, g, or t
  misc_feature (1343)..(1344): n is a, c, g, or t
  misc_feature (1347)..(1349): n is a, c, g, or t
  misc_feature (1355)..(1355): n is a, c, g, or t
agagaaattactatgagaggatcgcatcaccatcaccatcacggatcctatttaggtgacactatagaatcgtcgacccacgcgtccgggagcccagaggaggagagcagcctcctccctggatttggtgggggccggggaccttccttccgccggaagatgggcactgaggggtcagagccaggggaggggggcccagcccctgggacagcacagcagccaagggttcacggtgttgcccttcccgggttggaaagagccaagggttggagcttcgatgggaaacgagagggcccaggcccagaccaggagggcagcacccaggcctggcagaaacggcgctcttcagacgacgcagggcctggatcctggaagcccccaccaccgccccaaagcaccaaaccaagcttcagcgccatgcgcagagcagaggccacatggcacatagctgaagagagtgcccccaaccacagctgccagagtcccagcccagcctcccaagatggggaagaggagaaggaggggaccctcttcccagagaggacacttccagctaggaatgccaagctacaggaccccgctctagctccatggcctcccaagccagtggctgtgcccaggggccgccagcctccccaggagccaggggtcagggaggaggctgaggctggagatgcagctccaggagtcaacaaaccccggctgaggctgagctcacagcaagaccaagaggagcccgaagtccaagggccccctgatccaggccggcggactgcccccctgaagcccaagaggacacggcgggcacagtcctgtgacaagctggaacctgatanaanacggcctcctgaccccacaggaacctgtganccaggaacagactgacaactgccacaacacccttcctcagcctncgaatgtgcctcgcaaggactcaaacccctatccacccccagtccccnagggcccccttgccagcccctgtcntanangggcaaaacggcaggaccaggcattggggnaacttgaggcagggactaaaanaaangganccncttgnaaaaaggaggnttcatgctgcctcnaanctntctntgaaaaacttntggtggggntttntcctccccangagggggatntttttcctntntcccaggaantntttcccttttttttnaanaaaaaaaaattttcaaaaannnnnnnnnnnnnnnnnnnnnnnnnnnnnnnnnnnnnnnnnnnnnnnnnnnnnnnnnnnnnnnnnggggnnncccccnnggggnntaantttttnnnanttnnccnntgaaacnnnaaacccnancccnnntttttnaannttnnccnnntttttn

SEQ ID NO: 217 - DNA, 1199 bp, Homo Sapiens
  misc_feature (725)..(725): n is a, c, g, or t
  misc_feature (781)..(781): n is a, c, g, or t
  misc_feature (829)..(829): n is a, c, g, or t
  misc_feature (860)..(860): n is a, c, g, or t
  misc_feature (899)..(899): n is a, c, g, or t
  misc_feature (907)..(907): n is a, c, g, or t
  misc_feature (919)..(919): n is a, c, g, or t
  misc_feature (931)..(931): n is a, c, g, or t
  misc_feature (955)..(955): n is a, c, g, or t
  misc_feature (967)..(967): n is a, c, g, or t
  misc_feature (969)..(969): n is a, c, g, or t
  misc_feature (977)..(977): n is a, c, g, or t
  misc_feature (998)..(998): n is a, c, g, or t
  misc_feature (1015)..(1015): n is a, c, g, or t
  misc_feature (1033)..(1033): n is a, c, g, or t
  misc_feature (1074)..(1074): n is a, c, g, or t
  misc_feature (1079)..(1079): n is a, c, g, or t
  misc_feature (1081)..(1081): n is a, c, g, or t
  misc_feature (1102)..(1102): n is a, c, g, or t
  misc_feature (1104)..(1104): n is a, c, g, or t
  misc_feature (1124)..(1124): n is a, c, g, or t
  misc_feature (1129)..(1129): n is a, c, g, or t
  misc_feature (1135)..(1135): n is a, c, g, or t
  misc_feature (1138)..(1138): n is a, c, g, or t
  misc_feature (1149)..(1149): n is a, c, g, or t
  misc_feature (1164)..(1164): n is a, c, g, or t
  misc_feature (1168)..(1168): n is a, c, g, or t
  misc_feature (1172)..(1172): n is a, c, g, or t
  misc_feature (1179)..(1180): n is a, c, g, or t
  misc_feature (1184)..(1184): n is a, c, g, or t
  misc_feature (1195)..(1195): n is a, c, g, or t
aaatagagaaattactatgagaggatcgcatcaccatcaccatcacggatcctatttaggtgacactatagaatcgtcgacccacgcgtccgagcggatcgcgggctcgggctgcggggctccggctgcgggcgctgggccgcgaggcgcggagcttgggagcggagcccaggccgtgccgcgcggcgccatgaagggcaaggaggagaaggagggcggcgcacggctgggcgctggcggcggaagccccgagaagagcccgagcgcgcaggagctcaaggagcagggcaatcgtctgttcgtgggccgaaagtacccggaggcggcggcctgctacggccgcgcgatcacccggaacccgctggtggccgtgtattacaccaaccgggccttgtgctacctgaagatgcagcagcacgagcaggccctggccgactgccggcgcgccctggagctggacgggcagtctgtgaaggcgcacttcttcctggggcagtgccagctggagatggagagctatgatgaggccatcgccaatctgcagcgagcttacagcctggccaaggagcagcggctgaacttcggggacgacatccccagcgctcttcgaatcgcgaagaagaagcgctggaacagcattgaggagcggcgcatccaccaggagagcgagctgcactcctacctctccaggctcattgccgcggagcgtgagagggagctggaanagtgccagcgaaaccacgagggtgatgaggacgacagccacgtccgggcccagcangcctgcattgaggccaagcacgacaagtacatggcggacatggacganctttttttctcaggtggatgaaaaaaggaanaagcgagacatcccccgactacctgtgtggcaagatcancttttganctgatgcggganccgtgcatcacncccaagtggcatcacctacaaccncaaggaaattcnangaaacacntgcagcgtgtgggttattttnacccccttaaccggaanccccttaaccaagaaaanctcatccccactttggttttaaagaagttattgacccattnttttntnaaaatggctgggtggaaaaananttaagtttccctgccctaantgggnccttgntcnagggaaccctngggaaaaacccccgncccntaanaaatttnntttnttggccccccnaacc

SEQ ID NO: 218 - DNA, 805 bp, Homo Sapiens
atggcttccaaaagagctctggtcatcctggctaaaggagcagaggaaatggagacggtcatccctgtagatgtcatgaggcgagctgggattaaggtcaccgttgcaggcctggctggaaaagacccagtacagtgtagccgtgatgtggtcatttgtcctgatgccagccttgaagatgcaaaaaaagagggaccatatgatgtggtggttctaccaggaggtaatctgggtgcacagaatttatctgagtctgctgctgtgaaggagatactgaaggagcaggaaaaccggaagggcctgatagccgccatctgtgcaggtcctactgctctgttggctcatgaaataggttttggaagtaaagttacaacacaccctcttgctaaagacaaaatgatgaatggaggtcattacacctactctgagaatcgtgtggaaaaagacggcctgattcttacaagccgggggcctgggaccagcttcgagtttgcgcttgcaattgttgaagccctgaatggcaaggaggtggcggctcaagtgaaggctccacttgttcttaaagactagagcagcgaactgcgacgatcacttagagaaacaggccgttaggaatccattctcactgtgttcgctctaaacaaaacagtggtaggttaatgtgttcagaagtcgctgtccttactacttttgcggaagtatggaagtcacaactacacagagatttctcagcctacaaattgtgtctatacatttctaagccttgtttgcagaataaacagggcatttagcaaaaaaaaaaaaa

SEQ ID NO: 219 - DNA, 1410 bp, Homo Sapiens
  misc_feature (595)..(595): n is a, c, g, or t
  misc_feature (600)..(600): n is a, c, g, or t
  misc_feature (679)..(679): n is a, c, g, or t
  misc_feature (689)..(689): n is a, c, g, or t
  misc_feature (706)..(706): n is a, c, g, or t
  misc_feature (709)..(709): n is a, c, g, or t
  misc_feature (713)..(713): n is a, c, g, or t
  misc_feature (717)..(718): n is a, c, g, or t
  misc_feature (723)..(723): n is a, c, g, or t
  misc_feature (734)..(734): n is a, c, g, or t
  misc_feature (740)..(740): n is a, c, g, or t
  misc_feature (762)..(762): n is a, c, g, or t
  misc_feature (764)..(765): n is a, c, g, or t
  misc_feature (778)..(778): n is a, c, g, or t
  misc_feature (785)..(785): n is a, c, g, or t
  misc_feature (796)..(796): n is a, c, g, or t
  misc_feature (808)..(808): n is a, c, g, or t
  misc_feature (813)..(813): n is a, c, g, or t
  misc_feature (815)..(815): n is a, c, g, or t
  misc_feature (817)..(817): n is a, c, g, or t
  misc_feature (819)..(820): n is a, c, g, or t
  misc_feature (822)..(822): n is a, c, g, or t
  misc_feature (825)..(825): n is a, c, g, or t
  misc_feature (829)..(829): n is a, c, g, or t
  misc_feature (837)..(837): n is a, c, g, or t
  misc_feature (839)..(839): n is a, c, g, or t
  misc_feature (841)..(842): n is a, c, g, or t
  misc_feature (845)..(845): n is a, c, g, or t
  misc_feature (853)..(853): n is a, c, g, or t
  misc_feature (856)..(856): n is a, c, g, or t
  misc_feature (858)..(858): n is a, c, g, or t
  misc_feature (861)..(861): n is a, c, g, or t
  misc_feature (863)..(863): n is a, c, g, or t
  misc_feature (865)..(865): n is a, c, g, or t
  misc_feature (867)..(867): n is a, c, g, or t
  misc_feature (870)..(870): n is a, c, g, or t
  misc_feature (874)..(874): n is a, c, g, or t
  misc_feature (876)..(876): n is a, c, g, or t
  misc_feature (878)..(879): n is a, c, g, or t
  misc_feature (888)..(888): n is a, c, g, or t
  misc_feature (890)..(891): n is a, c, g, or t
  misc_feature (893)..(895): n is a, c, g, or t
  misc_feature (906)..(907): n is a, c, g, or t
  misc_feature (909)..(909): n is a, c, g, or t
  misc_feature (914)..(914): n is a, c, g, or t
  misc_feature (918)..(919): n is a, c, g, or t
  misc_feature (921)..(921): n is a, c, g, or t
  misc_feature (930)..(930): n is a, c, g, or t
  misc_feature (939)..(940): n is a, c, g, or t
  misc_feature (942)..(945): n is a, c, g, or t
  misc_feature (950)..(951): n is a, c, g, or t
  misc_feature (954)..(954): n is a, c, g, or t
  misc_feature (957)..(958): n is a, c, g, or t
  misc_feature (960)..(960): n is a, c, g, or t
  misc_feature (966)..(967): n is a, c, g, or t
  misc_feature (973)..(973): n is a, c, g, or t
  misc_feature (976)..(976): n is a, c, g, or t
  misc_feature (979)..(982): n is a, c, g, or t
  misc_feature (984)..(984): n is a, c, g, or t
  misc_feature (987)..(988): n is a, c, g, or t
  misc_feature (994)..(994): n is a, c, g, or t
  misc_feature (998)..(999): n is a, c, g, or t
  misc_feature (1002)..(1003): n is a, c, g, or t
  misc_feature (1005)..(1007): n is a, c, g, or t
  misc_feature (1012)..(1012): n is a, c, g, or t
  misc_feature (1014)..(1014): n is a, c, g, or t
  misc_feature (1017)..(1018): n is a, c, g, or t
  misc_feature (1022)..(1023): n is a, c, g, or t
  misc_feature (1033)..(1033): n is a, c, g, or t
  misc_feature (1043)..(1043): n is a, c, g, or t
  misc_feature (1045)..(1045): n is a, c, g, or t
  misc_feature (1047)..(1047): n is a, c, g, or t
  misc_feature (1055)..(1056): n is a, c, g, or t
  misc_feature (1063)..(1063): n is a, c, g, or t
  misc_feature (1067)..(1067): n is a, c, g, or t
  misc_feature (1077)..(1079): n is a, c, g, or t
  misc_feature (1081)..(1083): n is a, c, g, or t
  misc_feature (1086)..(1086): n is a, c, g, or t
  misc_feature (1088)..(1088): n is a, c, g, or t
  misc_feature (1092)..(1092): n is a, c, g, or t
  misc_feature (1102)..(1105): n is a, c, g, or t
  misc_feature (1108)..(1108): n is a, c, g, or t
  misc_feature (1112)..(1112): n is a, c, g, or t
  misc_feature (1117)..(1117): n is a, c, g, or t
  misc_feature (1123)..(1123): n is a, c, g, or t
  misc_feature (1126)..(1126): n is a, c, g, or t
  misc_feature (1129)..(1131): n is a, c, g, or t
  misc_feature (1133)..(1133): n is a, c, g, or t
  misc_feature (1135)..(1141): n is a, c, g, or t
  misc_feature (1143)..(1144): n is a, c, g, or t
  misc_feature (1146)..(1146): n is a, c, g, or t
  misc_feature (1148)..(1149): n is a, c, g, or t
  misc_feature (1151)..(1151): n is a, c, g, or t
  misc_feature (1154)..(1154): n is a, c, g, or t
  misc_feature (1156)..(1156): n is a, c, g, or t
  misc_feature (1162)..(1164): n is a, c, g, or t
  misc_feature (1166)..(1166): n is a, c, g, or t
  misc_feature (1170)..(1170): n is a, c, g, or t
  misc_feature (1173)..(1176): n is a, c, g, or t
  misc_feature (1178)..(1178): n is a, c, g, or t
  misc_feature (1182)..(1182): n is a, c, g, or t
  misc_feature (1187)..(1187): n is a, c, g, or t
  misc_feature (1191)..(1193): n is a, c, g, or t
  misc_feature (1198)..(1198): n is a, c, g, or t
  misc_feature (1201)..(1201): n is a, c, g, or t
  misc_feature (1207)..(1207): n is a, c, g, or t
  misc_feature (1209)..(1210): n is a, c, g, or t
  misc_feature (1213)..(1213): n is a, c, g, or t
  misc_feature (1215)..(1216): n is a, c, g, or t
  misc_feature (1222)..(1222): n is a, c, g, or t
  misc_feature (1228)..(1229): n is a, c, g, or t
  misc_feature (1232)..(1232): n is a, c, g, or t
  misc_feature (1236)..(1237): n is a, c, g, or t
  misc_feature (1240)..(1240): n is a, c, g, or t
  misc_feature (1242)..(1242): n is a, c, g, or t
  misc_feature (1245)..(1245): n is a, c, g, or t
  misc_feature (1249)..(1249): n is a, c, g, or t
  misc_feature (1251)..(1251): n is a, c, g, or t
  misc_feature (1254)..(1254): n is a, c, g, or t
  misc_feature (1256)..(1256): n is a, c, g, or t
  misc_feature (1261)..(1266): n is a, c, g, or t
  misc_feature (1269)..(1269): n is a, c, g, or t
  misc_feature (1271)..(1272): n is a, c, g, or t
  misc_feature (1274)..(1275): n is a, c, g, or t
  misc_feature (1277)..(1278): n is a, c, g, or t
  misc_feature (1280)..(1280): n is a, c, g, or t
  misc_feature (1282)..(1282): n is a, c, g, or t
  misc_feature (1284)..(1284): n is a, c, g, or t
  misc_feature (1286)..(1286): n is a, c, g, or t
  misc_feature (1290)..(1290): n is a, c, g, or t
  misc_feature (1292)..(1293): n is a, c, g, or t
  misc_feature (1296)..(1297): n is a, c, g, or t
  misc_feature (1299)..(1301): n is a, c, g, or t
  misc_feature (1306)..(1306): n is a, c, g, or t
  misc_feature (1312)..(1312): n is a, c, g, or t
  misc_feature (1316)..(1319): n is a, c, g, or t
  misc_feature (1322)..(1325): n is a, c, g, or t
  misc_feature (1327)..(1327): n is a, c, g, or t
  misc_feature (1330)..(1331): n is a, c, g, or t
  misc_feature (1334)..(1336): n is a, c, g, or t
  misc_feature (1339)..(1343): n is a, c, g, or t
  misc_feature (1345)..(1345): n is a, c, g, or t
  misc_feature (1348)..(1348): n is a, c, g, or t
  misc_feature (1350)..(1350): n is a, c, g, or t
  misc_feature (1352)..(1358): n is a, c, g, or t
  misc_feature (1360)..(1364): n is a, c, g, or t
  misc_feature (1368)..(1368): n is a, c, g, or t
  misc_feature (1370)..(1370): n is a, c, g, or t
  misc_feature (1373)..(1374): n is a, c, g, or t
  misc_feature (1378)..(1378): n is a, c, g, or t
  misc_feature (1382)..(1384): n is a, c, g, or t
  misc_feature (1386)..(1386): n is a, c, g, or t
  misc_feature (1388)..(1388): n is a, c, g, or t
  misc_feature (1391)..(1391): n is a, c, g, or t
  misc_feature (1400)..(1400): n is a, c, g, or t
  misc_feature (1402)..(1402): n is a, c, g, or t
  misc_feature (1404)..(1407): n is a, c, g, or t
  misc_feature (1409)..(1410): n is a, c, g, or t
atagagagattactatgagaggatcgcatcaccatcaccatcacggatcctatttaggtgacactatagaatcgtcgacccacgcgtccgtgcgggctcatcctcaattcttagcgatggagtgtacgagaggcacatggaccctctgctgctaccaggcgagctcgcgagccccagccaggcccttggagctggggagatcccggcaccttctgagacaccctggctttctccggaccccctgtttctggaacagaggagggtcagagaagcaaagaccgaagaggacggccctgccaacaccgagcagaagctgaagtcctttccagaggaccctcagcacctgggggagtggggccacctggaccctgccgaggagaacctgaagagctaccggaagctgctcctgtgggggtatcagctttcccagcctgacgctgcctccaggctggacactgaggaactccggttggtggaaagagatccacaaggaagcagcctcccagaaggcgggaggcggcaggagagcgctgggtgcgcctgcgaggaggccgcccccgcgggggtgctgcctgagctgcctacggaggcgccncctgnggacgcccttgccgatcccccgtcgggcaccactgaggaggaggaagaacagcctgggaaggccccggacccgcagganccccaggacncagaagtccgactctgnccnccgnaatnncaaangcaatccgtcntccaancaaccctggccccggaaagggncnncgactaaactggngaaaccnataaagccccncccccgaagaanggggnancngnnanaancctncaaaggcntntnnaanctccggtnaananccnanangnttngaancngnntaaggtccntnnannnctaaaaaaccnngnctttntccnncngaaaatccntaatccttnnannnnaattnntanaanncnttttcnnatcggnttntcnnnncntannggaaanaccnnaannannnttgcngnccnnaaannctaatcctgnaaaggactantntnaaaaaacnnccattanaccntgaccctaannnannnctnanaaantcttatcaannnnaanaaanttctnctctcngcnaannncnannnnnnnannantnnanctncncttaannncnacangannnnantgcnaagcntccnnnaaaanttnctaaangnngantnnccctcncccctnntantaannaananttnactntnttncnttctnnnnnnagnanncnntnnancncnantcanannaanntnnntactnctacanctcnnnnagnnnntnctnncannntcnnnnncnttnantnnnnnnnannnnnacantnacnntatnaagnnnananatntttaacatnanannnnann

SEQ ID NO: 220 - DNA, 1354 bp, Homo Sapiens
  misc_feature (905)..(905): n is a, c, g, or t
  misc_feature (907)..(907): n is a, c, g, or t
  misc_feature (909)..(909): n is a, c, g, or t
  misc_feature (921)..(921): n is a, c, g, or t
  misc_feature (931)..(931): n is a, c, g, or t
  misc_feature (934)..(934): n is a, c, g, or t
  misc_feature (942)..(942): n is a, c, g, or t
  misc_feature (952)..(952): n is a, c, g, or t
  misc_feature (954)..(954): n is a, c, g, or t
  misc_feature (963)..(963): n is a, c, g, or t
  misc_feature (972)..(972): n is a, c, g, or t
  misc_feature (981)..(981): n is a, c, g, or t
  misc_feature (999)..(999): n is a, c, g, or t
  misc_feature (1003)..(1003): n is a, c, g, or t
  misc_feature (1005)..(1005): n is a, c, g, or t
  misc_feature (1012)..(1012): n is a, c, g, or t
  misc_feature (1033)..(1033): n is a, c, g, or t
  misc_feature (1037)..(1037): n is a, c, g, or t
  misc_feature (1063)..(1063): n is a, c, g, or t
  misc_feature (1080)..(1080): n is a, c, g, or t
  misc_feature (1097)..(1097): n is a, c, g, or t
  misc_feature (1101)..(1101): n is a, c, g, or t
  misc_feature (1110)..(1111): n is a, c, g, or t
  misc_feature (1114)..(1115): n is a, c, g, or t
  misc_feature (1123)..(1123): n is a, c, g, or t
  misc_feature (1128)..(1128): n is a, c, g, or t
  misc_feature (1142)..(1142): n is a, c, g, or t
  misc_feature (1159)..(1159): n is a, c, g, or t
  misc_feature (1177)..(1177): n is a, c, g, or t
  misc_feature (1187)..(1188): n is a, c, g, or t
  misc_feature (1190)..(1191): n is a, c, g, or t
  misc_feature (1193)..(1193): n is a, c, g, or t
  misc_feature (1196)..(1197): n is a, c, g, or t
  misc_feature (1202)..(1202): n is a, c, g, or t
  misc_feature (1205)..(1206): n is a, c, g, or t
  misc_feature (1213)..(1214): n is a, c, g, or t
  misc_feature (1238)..(1238): n is a, c, g, or t
  misc_feature (1240)..(1240): n is a, c, g, or t
  misc_feature (1264)..(1264): n is a, c, g, or t
  misc_feature (1276)..(1278): n is a, c, g, or t
  misc_feature (1282)..(1282): n is a, c, g, or t
  misc_feature (1285)..(1286): n is a, c, g, or t
  misc_feature (1289)..(1289): n is a, c, g, or t
  misc_feature (1291)..(1291): n is a, c, g, or t
  misc_feature (1293)..(1293): n is a, c, g, or t
  misc_feature (1316)..(1316): n is a, c, g, or t
  misc_feature (1318)..(1319): n is a, c, g, or t
  misc_feature (1321)..(1323): n is a, c, g, or t
  misc_feature (1325)..(1325): n is a, c, g, or t
  misc_feature (1328)..(1328): n is a, c, g, or t
  misc_feature (1332)..(1332): n is a, c, g, or t
  misc_feature (1334)..(1335): n is a, c, g, or t
  misc_feature (1340)..(1340): n is a, c, g, or t
  misc_feature (1344)..(1347): n is a, c, g, or t
  misc_feature (1349)..(1349): n is a, c, g, or t
tagagaaattactatgagaggatcgcatcaccatcaccatcacggatcctatttaggtgacactatagaatcgtcgacccacgcgtccgcggggccggagcagcgggcggcggcggaggcggcgcccgggagcgctcttcgcttccctcggggtcttgctcggacctcggccaccgcctgggatccccaggactcgtgcgtgcagcatgggcggcgtcggggagccgggaccgcgggagggacccgcgcagccgggggcaccgctgcccaccttctgctgggagcagatccgcgcgcacgaccagcccggcgacaagtggctggtcatcgagcgccgcgtctacgacatcagccgctgggcacagcggcacccagggggcagccgcctcatcggccaccacggcgctgaggacgccacggatgccttccgtgccttccatcaagatctcaattttgtgcgcaagttcctacagcccctgttgattggagagctggctccggaagaacccagccaggatggacccctgaatgcgcagctggtcgaggacttccgagccctgcaccaggcagccgaggacatgaagctgtttgatgccagtcccaccttctttgctttcctactgggccacatcctggccatggaggtgctggcctggctccttatctacctcctgggtcctggctgggtgcccagtgccctggccgccttcatcctggccatctctcaggctcagtcctggtgtctgcagcatgacctgggccatgcctccatcttcaagaagtcctggtggaaccacgtggcccagaagttcgtgatggggcagctaaagggcttctccgcccactggtggaacttccgccacttccagcaccacgccaagcccaacatctttcacaaagaaccnanangtgacggtggcncccgtcttcntcntgggggantcatccgtcnantatggcaanaaaaaaacncaaaaaacntacccttaaaacaagcancacntntaatttnttcttgatgggccgccgctgntccncctggtgaaattttaaatgaaaaatntggcgaaatgctggtgngcaagcaagggggggantttntttgggccnncannttttatgnccccnttttttttatctanctcccttttaaagggtncctgggggggtgctcttnttttttcctnnannanggnnggganttnnaagttcnnacaagggaaagggggacccccttngnccccccaaaaaatttttttttctntttaaaaagggnnnaggnatnnccncntntttttggggaaaaaaaaaaaaangnngnnnanccnggtntnnttttnaaannnncntttta

SEQ ID NO: 221 - DNA, 1463 bp, Homo Sapiens
  misc_feature (232)..(232): n is a, c, g, or t
  misc_feature (475)..(475): n is a, c, g, or t
  misc_feature (553)..(553): n is a, c, g, or t
  misc_feature (596)..(596): n is a, c, g, or t
  misc_feature (608)..(608): n is a, c, g, or t
  misc_feature (635)..(635): n is a, c, g, or t
  misc_feature (649)..(649): n is a, c, g, or t
  misc_feature (657)..(657): n is a, c, g, or t
  misc_feature (715)..(715): n is a, c, g, or t
  misc_feature (730)..(730): n is a, c, g, or t
  misc_feature (735)..(735): n is a, c, g, or t
  misc_feature (747)..(747): n is a, c, g, or t
  misc_feature (752)..(752): n is a, c, g, or t
  misc_feature (765)..(766): n is a, c, g, or t
  misc_feature (779)..(779): n is a, c, g, or t
  misc_feature (787)..(788): n is a, c, g, or t
  misc_feature (827)..(828): n is a, c, g, or t
  misc_feature (843)..(843): n is a, c, g, or t
  misc_feature (845)..(845): n is a, c, g, or t
  misc_feature (861)..(861): n is a, c, g, or t
  misc_feature (882)..(882): n is a, c, g, or t
  misc_feature (886)..(886): n is a, c, g, or t
  misc_feature (889)..(889): n is a, c, g, or t
  misc_feature (899)..(900): n is a, c, g, or t
  misc_feature (908)..(909): n is a, c, g, or t
  misc_feature (911)..(913): n is a, c, g, or t
  misc_feature (929)..(929): n is a, c, g, or t
  misc_feature (933)..(933): n is a, c, g, or t
  misc_feature (942)..(942): n is a, c, g, or t
  misc_feature (948)..(948): n is a, c, g, or t
  misc_feature (956)..(957): n is a, c, g, or t
  misc_feature (970)..(970): n is a, c, g, or t
  misc_feature (976)..(976): n is a, c, g, or t
  misc_feature (985)..(986): n is a, c, g, or t
  misc_feature (991)..(991): n is a, c, g, or t
  misc_feature (1001)..(1001): n is a, c, g, or t
  misc_feature (1006)..(1006): n is a, c, g, or t
  misc_feature (1008)..(1008): n is a, c, g, or t
  misc_feature (1016)..(1016): n is a, c, g, or t
  misc_feature (1024)..(1024): n is a, c, g, or t
  misc_feature (1032)..(1032): n is a, c, g, or t
  misc_feature (1041)..(1042): n is a, c, g, or t
  misc_feature (1049)..(1050): n is a, c, g, or t
  misc_feature (1052)..(1052): n is a, c, g, or t
  misc_feature (1054)..(1054): n is a, c, g, or t
  misc_feature (1065)..(1065): n is a, c, g, or t
  misc_feature (1067)..(1067): n is a, c, g, or t
  misc_feature (1075)..(1075): n is a, c, g, or t
  misc_feature (1078)..(1078): n is a, c, g, or t
  misc_feature (1090)..(1090): n is a, c, g, or t
  misc_feature (1094)..(1094): n is a, c, g, or t
  misc_feature (1104)..(1105): n is a, c, g, or t
  misc_feature (1116)..(1117): n is a, c, g, or t
  misc_feature (1129)..(1130): n is a, c, g, or t
  misc_feature (1138)..(1138): n is a, c, g, or t
  misc_feature (1141)..(1142): n is a, c, g, or t
  misc_feature (1146)..(1147): n is a, c, g, or t
  misc_feature (1153)..(1153): n is a, c, g, or t
  misc_feature (1158)..(1158): n is a, c, g, or t
  misc_feature (1167)..(1167): n is a, c, g, or t
  misc_feature (1169)..(1169): n is a, c, g, or t
  misc_feature (1171)..(1171): n is a, c, g, or t
  misc_feature (1173)..(1173): n is a, c, g, or t
  misc_feature (1175)..(1175): n is a, c, g, or t
  misc_feature (1177)..(1177): n is a, c, g, or t
  misc_feature (1179)..(1179): n is a, c, g, or t
  misc_feature (1186)..(1186): n is a, c, g, or t
  misc_feature (1188)..(1188): n is a, c, g, or t
  misc_feature (1198)..(1198): n is a, c, g, or t
  misc_feature (1207)..(1207): n is a, c, g, or t
  misc_feature (1214)..(1214): n is a, c, g, or t
  misc_feature (1227)..(1228): n is a, c, g, or t
  misc_feature (1232)..(1232): n is a, c, g, or t
  misc_feature (1236)..(1236): n is a, c, g, or t
  misc_feature (1246)..(1246): n is a, c, g, or t
  misc_feature (1249)..(1250): n is a, c, g, or t
  misc_feature (1254)..(1256): n is a, c, g, or t
  misc_feature (1260)..(1261): n is a, c, g, or t
  misc_feature (1263)..(1263): n is a, c, g, or t
  misc_feature (1269)..(1269): n is a, c, g, or t
  misc_feature (1273)..(1273): n is a, c, g, or t
  misc_feature (1276)..(1276): n is a, c, g, or t
  misc_feature (1284)..(1284): n is a, c, g, or t
  misc_feature (1289)..(1293): n is a, c, g, or t
  misc_feature (1296)..(1297): n is a, c, g, or t
  misc_feature (1299)..(1299): n is a, c, g, or t
  misc_feature (1302)..(1303): n is a, c, g, or t
  misc_feature (1305)..(1305): n is a, c, g, or t
  misc_feature (1308)..(1308): n is a, c, g, or t
  misc_feature (1328)..(1329): n is a, c, g, or t
  misc_feature (1336)..(1336): n is a, c, g, or t
  misc_feature (1347)..(1347): n is a, c, g, or t
  misc_feature (1360)..(1360): n is a, c, g, or t
  misc_feature (1365)..(1365): n is a, c, g, or t
  misc_feature (1371)..(1372): n is a, c, g, or t
  misc_feature (1379)..(1380): n is a, c, g, or t
  misc_feature (1385)..(1385): n is a, c, g, or t
  misc_feature (1395)..(1395): n is a, c, g, or t
  misc_feature (1397)..(1397): n is a, c, g, or t
  misc_feature (1400)..(1400): n is a, c, g, or t
  misc_feature (1406)..(1406): n is a, c, g, or t
  misc_feature (1413)..(1413): n is a, c, g, or t
  misc_feature (1416)..(1416): n is a, c, g, or t
  misc_feature (1423)..(1423): n is a, c, g, or t
  misc_feature (1430)..(1430): n is a, c, g, or t
  misc_feature (1441)..(1441): n is a, c, g, or t
  misc_feature (1444)..(1445): n is a, c, g, or t
  misc_feature (1447)..(1447): n is a, c, g, or t
  misc_feature (1453)..(1454): n is a, c, g, or t
  misc_feature (1463)..(1463): n is a, c, g, or t
gaatagagagattactatgagaggatcgcatcaccatcaccatcacggatcctatttaggtgacactatagaatcgtcgacccacgcgtccgggtttggttgtgagatcgagaataacagaagcagcggagcattctggaaatattactatgatggaaaggactacattgaattcaacaaagaaatcccagcctgggtccccttcgacccagcagcccagataaccaagcanaagtgggaggcagaaccagtctacgtgcagcgggccaaggcttacctggaggaggagtgccctgcgactctgcggaaatacctgaaatacagcaaaaatatcctggaccggcaagatcctccctctgtggtggtcaccagccaccaggccccaggagaaaagaagaaactgaagtgcctggcctacgacttctacccagggaaaattgatgtgcactggactcgggccggcgaggtgcaggancctgagttacggggagatgttcttcacaatggaaatggcacttaccagtcctgggtggtggtggcagtgcccccgcangacacagccccctactcctgccacgtgcagcacagcagcctgncccagcccctcntggtgccctgggaggccagctaggaancaagggttggaggnaatgtggnatctcaaacccagtaagctgcccttcctgcctgatgtgggagctgaaccacagaaatncacatgtcaatgganccacnaggccctgaagnagcantgtgggggggacnnaacaggaggttgnatttggannaccgaaagactgggatgcctgtcttgaagtataacttgnnacccaaaaaaaatcntntcacccttgagccccncccccaccccccttggtctantctngtnagaagctaannaaaataanncnnnccctcctttccctaancaanaaaaatgantaatanactaaaannttattttctactnagggcnggccccccnnccatnaaggagtccncaatnanatcttaantcaccttnatctttgncaccctgtnnaaaaaanncncnaaattgactcncnaacctccnttncgaattgttttnaaanactctcgttnngccccggcgtnnatttttttttgnngaaaaacnccnnttanncttggncaaantttttcganantnananancntaatatnanataaaaatcnccggttaanacccccntttaatttctccnngtgntccncaaaaaaatnttnntatnnntttnncntttcgntcanggncccatatngccannnnnctnncntgnnanttnccctcttttagaccctaaannaatatcncaagttttttntcgcccttttcanttctncccacnnataatcnnccccnatttctatgnanatnaaaacngaatcantgnaccaaantatcctntcttacctctntannanaataanntcttctccn

SEQ ID NO: 222 - DNA, 1343 bp, Homo Sapiens
  misc_feature (879)..(879): n is a, c, g, or t
  misc_feature (916)..(916): n is a, c, g, or t
  misc_feature (950)..(950): n is a, c, g, or t
  misc_feature (982)..(982): n is a, c, g, or t
  misc_feature (987)..(987): n is a, c, g, or t
  misc_feature (991)..(991): n is a, c, g, or t
  misc_feature (993)..(993): n is a, c, g, or t
  misc_feature (1015)..(1015): n is a, c, g, or t
  misc_feature (1019)..(1020): n is a, c, g, or t
  misc_feature (1038)..(1038): n is a, c, g, or t
  misc_feature (1040)..(1040): n is a, c, g, or t
  misc_feature (1042)..(1042): n is a, c, g, or t
  misc_feature (1045)..(1045): n is a, c, g, or t
  misc_feature (1088)..(1088): n is a, c, g, or t
  misc_feature (1097)..(1097): n is a, c, g, or t
  misc_feature (1101)..(1101): n is a, c, g, or t
  misc_feature (1107)..(1107): n is a, c, g, or t
  misc_feature (1116)..(1116): n is a, c, g, or t
  misc_feature (1120)..(1120): n is a, c, g, or t
  misc_feature (1124)..(1124): n is a, c, g, or t
  misc_feature (1134)..(1134): n is a, c, g, or t
  misc_feature (1137)..(1137): n is a, c, g, or t
  misc_feature (1149)..(1149): n is a, c, g, or t
  misc_feature (1164)..(1164): n is a, c, g, or t
  misc_feature (1176)..(1176): n is a, c, g, or t
  misc_feature (1187)..(1188): n is a, c, g, or t
  misc_feature (1194)..(1194): n is a, c, g, or t
  misc_feature (1197)..(1198): n is a, c, g, or t
  misc_feature (1202)..(1203): n is a, c, g, or t
  misc_feature (1208)..(1208): n is a, c, g, or t
  misc_feature (1210)..(1212): n is a, c, g, or t
  misc_feature (1220)..(1220): n is a, c, g, or t
  misc_feature (1230)..(1230): n is a, c, g, or t
  misc_feature (1234)..(1234): n is a, c, g, or t
  misc_feature (1237)..(1237): n is a, c, g, or t
  misc_feature (1239)..(1239): n is a, c, g, or t
  misc_feature (1243)..(1243): n is a, c, g, or t
  misc_feature (1249)..(1249): n is a, c, g, or t
  misc_feature (1251)..(1252): n is a, c, g, or t
  misc_feature (1254)..(1255): n is a, c, g, or t
  misc_feature (1259)..(1259): n is a, c, g, or t
  misc_feature (1266)..(1266): n is a, c, g, or t
  misc_feature (1273)..(1274): n is a, c, g, or t
  misc_feature (1276)..(1278): n is a, c, g, or t
  misc_feature (1282)..(1282): n is a, c, g, or t
  misc_feature (1292)..(1293): n is a, c, g, or t
  misc_feature (1301)..(1301): n is a, c, g, or t
  misc_feature (1305)..(1320): n is a, c, g, or t
  misc_feature (1322)..(1323): n is a, c, g, or t
  misc_feature (1326)..(1326): n is a, c, g, or t
  misc_feature (1336)..(1338): n is a, c, g, or t
  misc_feature (1343)..(1343): n is a, c, g, or t
attagagaaattactatgagaggatcgcatcaccatcaccatcacggatcctatttaggtgacactatagaatcgtcgacccacgcgtccgggcgaggactcggctgtgttgatggagagactgtgcaagtacatctacgccaaggaccgcacagaccggatccgcacatgtgccatcctctgccacatctaccaccatgctctgcactcgcgctggtaccaggcccgcgacctcatgctcatgagccacttgcaggacaacattcagcatgcagacccgccagtgcagatcctttacaaccgcaccatggtgcagctgggcatctgtgccttccgccaaggcctgaccaaggacgcacacaacgccctgctggacatccagtcgagtggccgagccaaggagcttctgggccagggcctgctgctgcgcagcctgcaggagcgcaaccaggagcaggagaaggtggagcggcgccgtcaggtccccttccacctgcacatcaacctggagctgctggagtgtgtctacctggtgtctgccatgctcctggagatcccctacatggccgcccatgagagcgatgcccgccgacgcatgatcagcaagcagttccaccaccagctgcgcgtgggcgagcgacagcccctgctgggtccccctgagtccatgcgggaacatgtggtcgctgcctccaaggccatgaagatgggtgactggaagacctgtcacagttttatcatcaatgagaagatgaatgggaaagtgtgggaccttttccccgaggctgacaaagtccgcaccatgctggttaggaagatccaggaagagtcactgaggacctacctcttcacctacagcagtgtctatgactccatcancatggagacgctgtcaaaatgtttgaactggatctgncccactgtgcactccatcatcagcaaaatgatcnttaatgaggagctgatggcctccctggaccanccaanacananagtggtgatgcaccgcactgancccnntgcccaaaaaaacttggntntncanctggccaaaaactggccacctggtgaaaaaacaaagggtgttnaaccaaaanaggnacttangggggctanttcnaaanccaaaagganggntaccccaaaacnagggttaatgccccnggggggttaccncaaaaaaattnnaaaagnctnntgannttccntnnntttccccngggccttcancttnaancnaacnaccccnanncnnaaangcttttnaattttnngnnnattnttttccccannaaaaaaanaaannnnnnnnnnnnnnnnannggncccccctatnnnttatn

SEQ ID NO: 223 - DNA, 1200 bp, Homo Sapiens
  misc_feature (2)..(2): n is a, c, g, or t
  misc_feature (456)..(456): n is a, c, g, or t
  misc_feature (473)..(473): n is a, c, g, or t
  misc_feature (524)..(524): n is a, c, g, or t
  misc_feature (541)..(541): n is a, c, g, or t
  misc_feature (578)..(578): n is a, c, g, or t
  misc_feature (662)..(662): n is a, c, g, or t
  misc_feature (669)..(669): n is a, c, g, or t
  misc_feature (674)..(674): n is a, c, g, or t
  misc_feature (684)..(684): n is a, c, g, or t
  misc_feature (701)..(701): n is a, c, g, or t
  misc_feature (711)..(711): n is a, c, g, or t
  misc_feature (732)..(733): n is a, c, g, or t
  misc_feature (739)..(739): n is a, c, g, or t
  misc_feature (753)..(753): n is a, c, g, or t
  misc_feature (755)..(755): n is a, c, g, or t
  misc_feature (758)..(759): n is a, c, g, or t
  misc_feature (768)..(768): n is a, c, g, or t
  misc_feature (770)..(770): n is a, c, g, or t
  misc_feature (774)..(774): n is a, c, g, or t
  misc_feature (776)..(777): n is a, c, g, or t
  misc_feature (782)..(782): n is a, c, g, or t
  misc_feature (789)..(789): n is a, c, g, or t
  misc_feature (791)..(791): n is a, c, g, or t
  misc_feature (794)..(794): n is a, c, g, or t
  misc_feature (815)..(816): n is a, c, g, or t
  misc_feature (821)..(821): n is a, c, g, or t
  misc_feature (830)..(830): n is a, c, g, or t
  misc_feature (835)..(837): n is a, c, g, or t
  misc_feature (839)..(839): n is a, c, g, or t
  misc_feature (843)..(843): n is a, c, g, or t
  misc_feature (845)..(845): n is a, c, g, or t
  misc_feature (853)..(853): n is a, c, g, or t
  misc_feature (860)..(860): n is a, c, g, or t
  misc_feature (864)..(865): n is a, c, g, or t
  misc_feature (874)..(874): n is a, c, g, or t
  misc_feature (882)..(882): n is a, c, g, or t
  misc_feature (884)..(884): n is a, c, g, or t
  misc_feature (889)..(889): n is a, c, g, or t
  misc_feature (892)..(892): n is a, c, g, or t
  misc_feature (894)..(894): n is a, c, g, or t
  misc_feature (897)..(898): n is a, c, g, or t
  misc_feature (902)..(902): n is a, c, g, or t
  misc_feature (914)..(916): n is a, c, g, or t
  misc_feature (920)..(920): n is a, c, g, or t
  misc_feature (924)..(925): n is a, c, g, or t
  misc_feature (927)..(927): n is a, c, g, or t
  misc_feature (929)..(929): n is a, c, g, or t
  misc_feature (934)..(934): n is a, c, g, or t
  misc_feature (936)..(936): n is a, c, g, or t
  misc_feature (938)..(939): n is a, c, g, or t
  misc_feature (948)..(949): n is a, c, g, or t
  misc_feature (953)..(953): n is a, c, g, or t
  misc_feature (961)..(961): n is a, c, g, or t
  misc_feature (973)..(973): n is a, c, g, or t
  misc_feature (976)..(979): n is a, c, g, or t
  misc_feature (982)..(984): n is a, c, g, or t
  misc_feature (989)..(989): n is a, c, g, or t
  misc_feature (993)..(996): n is a, c, g, or t
  misc_feature (1005)..(1005): n is a, c, g, or t
  misc_feature (1009)..(1009): n is a, c, g, or t
  misc_feature (1011)..(1011): n is a, c, g, or t
  misc_feature (1014)..(1016): n is a, c, g, or t
  misc_feature (1019)..(1019): n is a, c, g, or t
  misc_feature (1024)..(1024): n is a, c, g, or t
  misc_feature (1027)..(1029): n is a, c, g, or t
  misc_feature (1031)..(1031): n is a, c, g, or t
  misc_feature (1034)..(1035): n is a, c, g, or t
  misc_feature (1037)..(1037): n is a, c, g, or t
  misc_feature (1039)..(1039): n is a, c, g, or t
  misc_feature (1041)..(1041): n is a, c, g, or t
  misc_feature (1043)..(1044): n is a, c, g, or t
  misc_feature (1046)..(1048): n is a, c, g, or t
  misc_feature (1054)..(1054): n is a, c, g, or t
  misc_feature (1057)..(1057): n is a, c, g, or t
  misc_feature (1059)..(1059): n is a, c, g, or t
  misc_feature (1064)..(1064): n is a, c, g, or t
  misc_feature (1069)..(1070): n is a, c, g, or t
  misc_feature (1074)..(1075): n is a, c, g, or t
  misc_feature (1078)..(1078): n is a, c, g, or t
  misc_feature (1080)..(1080): n is a, c, g, or t
  misc_feature (1082)..(1086): n is a, c, g, or t
  misc_feature (1088)..(1088): n is a, c, g, or t
  misc_feature (1094)..(1094): n is a, c, g, or t
  misc_feature (1096)..(1098): n is a, c, g, or t
  misc_feature (1100)..(1101): n is a, c, g, or t
  misc_feature (1103)..(1103): n is a, c, g, or t
  misc_feature (1107)..(1109): n is a, c, g, or t
  misc_feature (1115)..(1115): n is a, c, g, or t
  misc_feature (1118)..(1119): n is a, c, g, or t
  misc_feature (1121)..(1121): n is a, c, g, or t
  misc_feature (1124)..(1124): n is a, c, g, or t
  misc_feature (1129)..(1131): n is a, c, g, or t
  misc_feature (1133)..(1142): n is a, c, g, or t
  misc_feature (1144)..(1144): n is a, c, g, or t
  misc_feature (1146)..(1147): n is a, c, g, or t
  misc_feature (1150)..(1150): n is a, c, g, or t
  misc_feature (1155)..(1159): n is a, c, g, or t
  misc_feature (1161)..(1164): n is a, c, g, or t
  misc_feature (1166)..(1166): n is a, c, g, or t
  misc_feature (1168)..(1169): n is a, c, g, or t
  misc_feature (1172)..(1175): n is a, c, g, or t
  misc_feature (1177)..(1179): n is a, c, g, or t
  misc_feature (1181)..(1183): n is a, c, g, or t
  misc_feature (1186)..(1188): n is a, c, g, or t
  misc_feature (1193)..(1195): n is a, c, g, or t
  misc_feature (1198)..(1198): n is a, c, g, or t
  misc_feature (1200)..(1200): n is a, c, g, or t
antagagagaattactatgagaggatcgcatcaccatcaccatcacggatcctatttaggtgacactatagaatcgtcgacccacgcgtccggtcatctcggacaccaccaagctgctgaagcccatcctggtcttcgcctttgccatcgccgcgggcgtatgcgggctcacgcagatcacgcagtaccgcagccaccctgtggacgtgtatgccggcttcctcatcggggcgggcatcgctgcctacctggcctgccacgcggtgggcaacttccaggccccacctgcagagaagcccgcggccccggcccccgccaaggacgcgctgcgggccctgacgcagcggggccacgactcggtttatcagcagaataagtcggtgagcaccgacgagctggggcccccagggcggctggagggcgcgccccggcccgtggcccgcgagaagacctcgntgggcagcctgaagcgngccagcgtggacgtggacctgctggccccgcgcagccccatggccaagganaacatggtgaccttcanccacacgctgcccagggccagcgcgccctcgctggangaccccgcgcgccgccacatgaccatccacgtgccgctggacgcctcgcgctccaagcagctcatcaacgagtggaagcagaanagcctgnagggncgcggcctgnggctgcccgacgacgcnagccccgggnacctgcgcgcgcccgccgaanncatggnggaggaggaggaanantannaggacgaanangaanannaggangaggaananganggaggacaagggcccgggccnngcccntcgctctancccannngnaggncngcccgggntttgggnactnnggattcatncttccacngnagcgnggngnccnntacnctgattaaaatnnnttangaannancngcaantngnngccggactnnctcnaaaatcgnggccggggtggncgnnnnttnnnttatnatannnntaaaaaaangggngnaannnatnaaacnttnnngnttnntntngnanntnnnaatttnaangnttccnggggnnccannttncnannnnnangaaatntnnntnntntttnnnaaaaanttnnantcntttannnannnnnnnnnntnannaanaaaannnnntnnnntntnnaannnnannnannnttnnnaaaannnatntn

SEQ ID NO: 224 - DNA, 1200 bp, Homo Sapiens
  misc_feature (880)..(880): n is a, c, g, or t
  misc_feature (897)..(897): n is a, c, g, or t
  misc_feature (979)..(979): n is a, c, g, or t
  misc_feature (999)..(999): n is a, c, g, or t
  misc_feature (1039)..(1039): n is a, c, g, or t
  misc_feature (1041)..(1041): n is a, c, g, or t
  misc_feature (1047)..(1047): n is a, c, g, or t
  misc_feature (1051)..(1051): n is a, c, g, or t
  misc_feature (1055)..(1056): n is a, c, g, or t
  misc_feature (1058)..(1058): n is a, c, g, or t
  misc_feature (1065)..(1065): n is a, c, g, or t
  misc_feature (1068)..(1068): n is a, c, g, or t
  misc_feature (1107)..(1107): n is a, c, g, or t
  misc_feature (1120)..(1120): n is a, c, g, or t
  misc_feature (1135)..(1135): n is a, c, g, or t
  misc_feature (1142)..(1142): n is a, c, g, or t
  misc_feature (1148)..(1148): n is a, c, g, or t
  misc_feature (1154)..(1154): n is a, c, g, or t
  misc_feature (1164)..(1164): n is a, c, g, or t
  misc_feature (1184)..(1184): n is a, c, g, or t
  misc_feature (1187)..(1187): n is a, c, g, or t
  misc_feature (1190)..(1190): n is a, c, g, or t
tagagaaattactatgagaggatcgcatcaccatcaccatcacggatcctatttaggtgacactatagaatcgtcgacccacgcgtccgggtttgggggcgggagacaggctgagccgcctgggcggcctggcctgtacggggcgggggaggccatggcctcggctgagttgcaggggaagtaccagaagctggctcaggagtactcgaagcttcgggctcagaatcaggttctgaaaaaaggtgttgtggatgaacaagcaaattctgcagctttaaaggagcaactgaaaatgaaggatcagtcattgagaaaactacaacaggaaatggacagtttgacatttcgaaatctgcagcttgccaagagggtagaactacttcaagatgaactagctctaagtgaaccacgaggcaagaaaaacaagaaaagtggagaatcttcttctcagttgagtcaagagcagaagagtgtctttgatgaagatctgcaaaagaagatagaagagaatgaacggttgcatatacaattttttgaagctgatgagcagcacaagcatgtggaagcagagctgaggagtcgactggccactctggagacagaagcagcccagcaccaagctgtggttgacggtctcacccggaagtacatggaaaccattgagaagctgcagaacgacaaggctaaactagaagtgaaatctcagactctagaaaaggaagccaaggaatgtcgacttcgaacggaagaatgtcaattacagttaaagactcttcatgaagatttgtcaggtagattagaggaatccttatcaatcatcaatgaaaaagtaccttttaatgatacaaaatatagtcagtacaacgctctgaacgttccnctccacaataggagacnccagctgaagatgcgagatattgctgggcaggccctggcttttgttcaggatcttgtgacggctcttctaaactttcatacntacccagaacagagaattcnaatttttcctggtgattccgccattgaccctatatctccntngaatcnaaanttcnncnaaaaccntcntgaaaagcctcctatgtcccccccttgagaaggatgctnctttttttgaaanttcctgaagaaccgngacttcntgaaanactggnaattgaaacnttttcaaaccttaccccccnaantgntttctaagaa

SEQ ID NO: 225 - DNA, 1339 bp, Homo Sapiens
  misc_feature (12)..(12): n is a, c, g, or t
  misc_feature (910)..(910): n is a, c, g, or t
  misc_feature (950)..(950): n is a, c, g, or t
  misc_feature (955)..(955): n is a, c, g, or t
  misc_feature (959)..(959): n is a, c, g, or t
  misc_feature (973)..(973): n is a, c, g, or t
  misc_feature (976)..(976): n is a, c, g, or t
  misc_feature (984)..(984): n is a, c, g, or t
  misc_feature (1006)..(1006): n is a, c, g, or t
  misc_feature (1039)..(1039): n is a, c, g, or t
  misc_feature (1061)..(1061): n is a, c, g, or t
  misc_feature (1073)..(1073): n is a, c, g, or t
  misc_feature (1076)..(1076): n is a, c, g, or t
  misc_feature (1078)..(1078): n is a, c, g, or t
  misc_feature (1084)..(1084): n is a, c, g, or t
  misc_feature (1090)..(1090): n is a, c, g, or t
  misc_feature (1095)..(1095): n is a, c, g, or t
  misc_feature (1098)..(1098): n is a, c, g, or t
  misc_feature (1102)..(1102): n is a, c, g, or t
  misc_feature (1107)..(1107): n is a, c, g, or t
  misc_feature (1126)..(1126): n is a, c, g, or t
  misc_feature (1145)..(1145): n is a, c, g, or t
  misc_feature (1151)..(1151): n is a, c, g, or t
  misc_feature (1155)..(1155): n is a, c, g, or t
  misc_feature (1161)..(1161): n is a, c, g, or t
  misc_feature (1164)..(1164): n is a, c, g, or t
  misc_feature (1167)..(1168): n is a, c, g, or t
  misc_feature (1171)..(1172): n is a, c, g, or t
  misc_feature (1174)..(1202): n is a, c, g, or t
  misc_feature (1208)..(1208): n is a, c, g, or t
  misc_feature (1219)..(1219): n is a, c, g, or t
  misc_feature (1225)..(1226): n is a, c, g, or t
  misc_feature (1230)..(1230): n is a, c, g, or t
  misc_feature (1238)..(1238): n is a, c, g, or t
  misc_feature (1243)..(1243): n is a, c, g, or t
  misc_feature (1253)..(1254): n is a, c, g, or t
  misc_feature (1264)..(1264): n is a, c, g, or t
  misc_feature (1270)..(1270): n is a, c, g, or t
  misc_feature (1275)..(1277): n is a, c, g, or t
  misc_feature (1296)..(1296): n is a, c, g, or t
  misc_feature (1310)..(1310): n is a, c, g, or t
  misc_feature (1321)..(1321): n is a, c, g, or t
  misc_feature (1323)..(1323): n is a, c, g, or t
  misc_feature (1335)..(1335): n is a, c, g, or t
tagagagattanctatgagaggatcgcatcaccatcaccatcacggatcctatttaggtgacactatagaatcgtcgacccacgcgtccgcagaatctagttctgtggttcgaaccagaagcaaccgagtggttgtagatccagttgtcactgagcaaccatctacttcttcagctgcaaagacttttattacaaaagctaatgcatctgcaataccagggaaaacaatactagagaattctgtgaaacattccaaagctttgaatactctttccagtcctggtcaatccagttttagtcatggcactaggaataattctgcaaaagaaaacatggaaaaggaaaagccagtcaaacgtaaaatgaagtcatctgtactcccaaaggcgtccactctttcaaagtcatcagctgtcattgagcaaggagattgtaagaacaacgctcttgtaccaggaaccattcaagtaaatggccatggaggacagccatcaaaacttgtgaagaggggacctggaaggaaacctaaagtagaagttaataccaatagtggtgaaattatacacaagaaaaggggtagaaagcccaaaaagctacagtatgcaaagccagaagatttagagcaaaataatgtgcatcccatcagagatgaagtacttccttcttcaacatgcaattttctttctgaaactaataatgtaaaggaagatttgttacagaaaaagaatcgtggaggtaggaagcccaaaaggaagatgaagacacaaaaattagatgcagatctcctagtccctgcaagtgtcaaagtgttaaggagaagtaaccgaaaaaagatagatgatcctatagatgaggaagaagagtttgaagaactcaaaggctctgaacccccatgagaactagaaatcanggtcgaaggacagctttctataatgaggatgactctgaanaggancaangcagctgttgttcnaanacccctcnttaactttggaacttctagtanaggacagtccaaagttgactgaaaagcaaagcnaatttaattggtgggaactggnaccaaaaatttnctncnaatctntaagcnggacngtnaggnaaaantaaaactaaggctccgctncctgcgccgggggggaaanggaagntttnattttnttnccnnaannannnnnnnnnnnnnnnnnnnnnnnnnnnnngggggngcccccccaanggggcnnatanctaatacnggacngggccccggnnaaacccaaangccccnaaccnnntggttttttaaaccccggngcccggggtttttngggaaaccccncntggggaatttgngaaa

SEQ ID NO: 226 - DNA, 855 bp, Homo Sapiens
ggtcgcatcaccatcaccatcacggatcctatttaggtgacactatagaatcgtcgacccacgcgtccgccctgggcctgggcctcaactcggccgcagcttccggcgtcctggccgccgtggccgccggggccaacccagcagccgccgccgccgccaacctcctggcatcctacgcgggcgaggccggggccgggccagccggaggggccgccccgccgccgcccccgcctcccggagccctggggtcctttgcgttggccgcagccgccaacggctacctcggggccggggcgggcggcggggcgggcggagggggcggcccgctggtggccgctgcagccgcggccggggcggccgggggcttcctgacggcggagaagctggcggctgagagtgccaaggagctggtggagattgcggtgcctgagaacctggtgggagccatcctggggaaggggggcaagacgttggtggagtaccaggagctgacgggcgctcgcatccagatctccaagaagggcgagttcctgccaggcacgcggaaccggcgggtcaccatcacgggcagccccgcggccacgcaagccgctcaatacctcatcagtcagcgggtcacctacgagcagggagtgagggcctcaaacccccagaaagtgggatgaggcctgtggtgtgtgctcccacccttttctctcctcccatctcctcctcttccctctcctcctcccccccaactcctgacctcagcttggtgtagtcctgctcctcttgggatggggctggggtaggcccgactgcaccctccccttctggtagtcataggcaggattgagtgacggttggggaaggggg

SEQ ID NO: 227 - DNA, 1466 bp, Homo Sapiens
  misc_feature (433)..(433): n is a, c, g, or t
  misc_feature (501)..(501): n is a, c, g, or t
  misc_feature (538)..(539): n is a, c, g, or t
  misc_feature (550)..(550): n is a, c, g, or t
  misc_feature (552)..(553): n is a, c, g, or t
  misc_feature (556)..(556): n is a, c, g, or t
  misc_feature (563)..(564): n is a, c, g, or t
  misc_feature (568)..(569): n is a, c, g, or t
  misc_feature (571)..(571): n is a, c, g, or t
  misc_feature (581)..(581): n is a, c, g, or t
  misc_feature (590)..(590): n is a, c, g, or t
  misc_feature (592)..(592): n is a, c, g, or t
  misc_feature (597)..(598): n is a, c, g, or t
  misc_feature (600)..(601): n is a, c, g, or t
  misc_feature (604)..(604): n is a, c, g, or t
  misc_feature (610)..(611): n is a, c, g, or t
  misc_feature (613)..(613): n is a, c, g, or t
  misc_feature (615)..(615): n is a, c, g, or t
  misc_feature (621)..(621): n is a, c, g, or t
  misc_feature (624)..(625): n is a, c, g, or t
  misc_feature (627)..(627): n is a, c, g, or t
  misc_feature (629)..(629): n is a, c, g, or t
  misc_feature (631)..(631): n is a, c, g, or t
  misc_feature (633)..(633): n is a, c, g, or t
  misc_feature (639)..(639): n is a, c, g, or t
  misc_feature (642)..(642): n is a, c, g, or t
  misc_feature (645)..(645): n is a, c, g, or t
  misc_feature (650)..(651): n is a, c, g, or t
  misc_feature (657)..(657): n is a, c, g, or t
  misc_feature (662)..(662): n is a, c, g, or t
  misc_feature (669)..(669): n is a, c, g, or t
  misc_feature (671)..(671): n is a, c, g, or t
  misc_feature (675)..(675): n is a, c, g, or t
  misc_feature (679)..(680): n is a, c, g, or t
  misc_feature (683)..(683): n is a, c, g, or t
  misc_feature (685)..(685): n is a, c, g, or t
  misc_feature (689)..(689): n is a, c, g, or t
  misc_feature (692)..(693): n is a, c, g, or t
  misc_feature (695)..(696): n is a, c, g, or t
  misc_feature (698)..(699): n is a, c, g, or t
  misc_feature (701)..(701): n is a, c, g, or t
  misc_feature (705)..(705): n is a, c, g, or t
  misc_feature (708)..(708): n is a, c, g, or t
  misc_feature (710)..(711): n is a, c, g, or t
  misc_feature (713)..(713): n is a, c, g, or t
  misc_feature (715)..(718): n is a, c, g, or t
  misc_feature (723)..(726): n is a, c, g, or t
  misc_feature (735)..(735): n is a, c, g, or t
  misc_feature (737)..(738): n is a, c, g, or t
  misc_feature (742)..(742): n is a, c, g, or t
  misc_feature (749)..(749): n is a, c, g, or t
  misc_feature (754)..(755): n is a, c, g, or t
  misc_feature (761)..(762): n is a, c, g, or t
  misc_feature (765)..(765): n is a, c, g, or t
  misc_feature (767)..(767): n is a, c, g, or t
  misc_feature (769)..(769): n is a, c, g, or t
  misc_feature (771)..(771): n is a, c, g, or t
  misc_feature (775)..(775): n is a, c, g, or t
  misc_feature (777)..(778): n is a, c, g, or t
  misc_feature (780)..(780): n is a, c, g, or t
  misc_feature (784)..(785): n is a, c, g, or t
  misc_feature (787)..(787): n is a, c, g, or t
  misc_feature (792)..(793): n is a, c, g, or t
  misc_feature (798)..(799): n is a, c, g, or t
  misc_feature (808)..(808): n is a, c, g, or t
  misc_feature (812)..(812): n is a, c, g, or t
  misc_feature (816)..(816): n is a, c, g, or t
  misc_feature (820)..(820): n is a, c, g, or t
  misc_feature (822)..(822): n is a, c, g, or t
  misc_feature (824)..(825): n is a, c, g, or t
  misc_feature (828)..(828): n is a, c, g, or t
  misc_feature (832)..(832): n is a, c, g, or t
  misc_feature (834)..(834): n is a, c, g, or t
  misc_feature (840)..(841): n is a, c, g, or t
  misc_feature (843)..(843): n is a, c, g, or t
  misc_feature (845)..(845): n is a, c, g, or t
  misc_feature (848)..(848): n is a, c, g, or t
  misc_feature (860)..(860): n is a, c, g, or t
  misc_feature (864)..(864): n is a, c, g, or t
  misc_feature (868)..(868): n is a, c, g, or t
  misc_feature (872)..(872): n is a, c, g, or t
  misc_feature (877)..(877): n is a, c, g, or t
  misc_feature (886)..(887): n is a, c, g, or t
  misc_feature (891)..(893): n is a, c, g, or t
  misc_feature (895)..(895): n is a, c, g, or t
  misc_feature (898)..(898): n is a, c, g, or t
  misc_feature (903)..(904): n is a, c, g, or t
  misc_feature (911)..(912): n is a, c, g, or t
  misc_feature (916)..(916): n is a, c, g, or t
  misc_feature (923)..(923): n is a, c, g, or t
  misc_feature (928)..(928): n is a, c, g, or t
  misc_feature (933)..(934): n is a, c, g, or t
  misc_feature (936)..(936): n is a, c, g, or t
  misc_feature (938)..(939): n is a, c, g, or t
  misc_feature (941)..(941): n is a, c, g, or t
  misc_feature (944)..(946): n is a, c, g, or t
  misc_feature (948)..(950): n is a, c, g, or t
  misc_feature (955)..(955): n is a, c, g, or t
  misc_feature (964)..(965): n is a, c, g, or t
  misc_feature (967)..(967): n is a, c, g, or t
  misc_feature (972)..(972): n is a, c, g, or t
  misc_feature (979)..(979): n is a, c, g, or t
  misc_feature (981)..(981): n is a, c, g, or t
  misc_feature (985)..(986): n is a, c, g, or t
  misc_feature (988)..(988): n is a, c, g, or t
  misc_feature (996)..(997): n is a, c, g, or t
  misc_feature (1001)..(1001): n is a, c, g, or t
  misc_feature (1003)..(1003): n is a, c, g, or t
  misc_feature (1006)..(1006): n is a, c, g, or t
  misc_feature (1008)..(1008): n is a, c, g, or t
  misc_feature (1011)..(1012): n is a, c, g, or t
  misc_feature (1019)..(1019): n is a, c, g, or t
  misc_feature (1022)..(1023): n is a, c, g, or t
  misc_feature (1028)..(1028): n is a, c, g, or t
  misc_feature (1030)..(1030): n is a, c, g, or t
  misc_feature (1037)..(1037): n is a, c, g, or t
  misc_feature (1044)..(1044): n is a, c, g, or t
  misc_feature (1047)..(1047): n is a, c, g, or t
  misc_feature (1049)..(1049): n is a, c, g, or t
  misc_feature (1054)..(1055): n is a, c, g, or t
  misc_feature (1069)..(1069): n is a, c, g, or t
  misc_feature (1081)..(1081): n is a, c, g, or t
  misc_feature (1083)..(1083): n is a, c, g, or t
  misc_feature (1086)..(1086): n is a, c, g, or t
  misc_feature (1091)..(1091): n is a, c, g, or t
  misc_feature (1093)..(1093): n is a, c, g, or t
  misc_feature (1096)..(1097): n is a, c, g, or t
  misc_feature (1099)..(1099): n is a, c, g, or t
  misc_feature (1101)..(1101): n is a, c, g, or t
  misc_feature (1108)..(1108): n is a, c, g, or t
  misc_feature (1110)..(1110): n is a, c, g, or t
  misc_feature (1113)..(1115): n is a, c, g, or t
  misc_feature (1117)..(1117): n is a, c, g, or t
  misc_feature (1120)..(1120): n is a, c, g, or t
  misc_feature (1127)..(1128): n is a, c, g, or t
  misc_feature (1133)..(1133): n is a, c, g, or t
  misc_feature (1137)..(1137): n is a, c, g, or t
  misc_feature (1148)..(1148): n is a, c, g, or t
  misc_feature (1155)..(1155): n is a, c, g, or t
  misc_feature (1161)..(1161): n is a, c, g, or t
  misc_feature (1163)..(1164): n is a, c, g, or t
  misc_feature (1167)..(1167): n is a, c, g, or t
  misc_feature (1176)..(1177): n is a, c, g, or t
  misc_feature (1187)..(1188): n is a, c, g, or t
  misc_feature (1192)..(1192): n is a, c, g, or t
  misc_feature (1196)..(1203): n is a, c, g, or t
  misc_feature (1206)..(1206): n is a, c, g, or t
  misc_feature (1209)..(1209): n is a, c, g, or t
  misc_feature (1216)..(1218): n is a, c, g, or t
  misc_feature (1221)..(1221): n is a, c, g, or t
  misc_feature (1225)..(1225): n is a, c, g, or t
  misc_feature (1227)..(1228): n is a, c, g, or t
  misc_feature (1234)..(1234): n is a, c, g, or t
  misc_feature (1237)..(1238): n is a, c, g, or t
  misc_feature (1241)..(1241): n is a, c, g, or t
  misc_feature (1244)..(1245): n is a, c, g, or t
  misc_feature (1249)..(1249): n is a, c, g, or t
  misc_feature (1253)..(1253): n is a, c, g, or t
  misc_feature (1260)..(1260): n is a, c, g, or t
  misc_feature (1263)..(1263): n is a, c, g, or t
  misc_feature (1265)..(1265): n is a, c, g, or t
  misc_feature (1267)..(1268): n is a, c, g, or t
  misc_feature (1272)..(1272): n is a, c, g, or t
  misc_feature (1278)..(1278): n is a, c, g, or t
  misc_feature (1280)..(1280): n is a, c, g, or t
  misc_feature (1287)..(1287): n is a, c, g, or t
  misc_feature (1289)..(1289): n is a, c, g, or t
  misc_feature (1291)..(1292): n is a, c, g, or t
  misc_feature (1294)..(1295): n is a, c, g, or t
  misc_feature (1300)..(1300): n is a, c, g, or t
  misc_feature (1302)..(1302): n is a, c, g, or t
  misc_feature (1306)..(1306): n is a, c, g, or t
  misc_feature (1308)..(1308): n is a, c, g, or t
  misc_feature (1310)..(1310): n is a, c, g, or t
  misc_feature (1312)..(1313): n is a, c, g, or t
  misc_feature (1317)..(1318): n is a, c, g, or t
  misc_feature (1321)..(1321): n is a, c, g, or t
  misc_feature (1332)..(1333): n is a, c, g, or t
  misc_feature (1335)..(1335): n is a, c, g, or t
  misc_feature (1337)..(1337): n is a, c, g, or t
  misc_feature (1342)..(1342): n is a, c, g, or t
  misc_feature (1345)..(1345): n is a, c, g, or t
  misc_feature (1348)..(1348): n is a, c, g, or t
  misc_feature (1352)..(1352): n is a, c, g, or t
  misc_feature (1355)..(1355): n is a, c, g, or t
  misc_feature (1358)..(1358): n is a, c, g, or t
  misc_feature (1361)..(1361): n is a, c, g, or t
  misc_feature (1366)..(1367): n is a, c, g, or t
  misc_feature (1380)..(1380): n is a, c, g, or t
  misc_feature (1382)..(1383): n is a, c, g, or t
  misc_feature (1400)..(1400): n is a, c, g, or t
  misc_feature (1408)..(1409): n is a, c, g, or t
  misc_feature (1415)..(1417): n is a, c, g, or t
  misc_feature (1419)..(1421): n is a, c, g, or t
  misc_feature (1425)..(1425): n is a, c, g, or t
  misc_feature (1432)..(1432): n is a, c, g, or t
  misc_feature (1440)..(1440): n is a, c, g, or t
  misc_feature (1445)..(1445): n is a, c, g, or t
  misc_feature (1451)..(1452): n is a, c, g, or t
  misc_feature (1456)..(1456): n is a, c, g, or t
  misc_feature (1458)..(1458): n is a, c, g, or t
  misc_feature (1460)..(1460): n is a, c, g, or t
  misc_feature (1462)..(1463): n is a, c, g, or t
  misc_feature (1465)..(1466): n is a, c, g, or t
tagagagattactatgagaggatcgcatcaccatcaccatcacggatcctatttaggtgacactatagaatcgtcgacccacgcgtccgcgggacgcgcttggccttgcccgcgcccgctcgcctcgtctcgcccggcctccccgcgtcgcctcgtcgcctgttccgcgccaggcatggcccccagcactgtggccgtggagctgctcagccccaaagagaaaaaccgactgcggaagccggtggtggagaagatgcgccgcgaccgcatcaacagcagcatcgagcagctgaagctgctgctggagcaggagttcgcgcggcaccagcccaactccaagctggagaaggccgacatcctggagatggctgtcagctacctgaagcacagcaaagccttcgtcgccgccgccggccccaagagcctgcaccangactacagcgaaggctactcgtggtgcctgcaggaggccgtgcagttcctgacgctccacgccgccancgacacgcaaatgaagctgctgtaccacttccagtgnnctccggccgcncnngcngtgcccnncaannancccaaggcancaggcgccncntcccnncnnacntctctnntncnaagctnttnntngnancngacgangcnaancaaanntaatancggtntctggcntncctnactnnttnangaanaanntnnannantgtnggncnnantnnnnaaaannnnagaatcctncnncctnttcaatngtagnnatatannttntntnangttntnntncccnnanattannaaaanntcttttctncctnaagntctnananncanattnanatgatnnananaanaaacccattcancganaatnatantacanaatttcccnnatcnnnantantaatnnttatgannaatnctttttntttantttannancnnanctnnntnnntttancttttaaannanttttnaaaaaanantttnntngaaatatnntcantncananttnnttcaaanaanntttanantacaagntttattnaanantaatnntctcttattttaanaaattttcttcnanatnccaantnttnnananatattcncnatnnntnatnttttaanncaaantatntttattttttntcaaatnaaattnannatnttattttcnnttaaaaatannctcntttnnnnnnnntanatnactttannnaanattnannaaattnttnnaantgnntacnatantaatttnacntntnnactntatttntnatttatnananncnntattntnaaanantntnnattnnaanattttattttnntnantaatnaantanactnttnctnctnaacgnntttcttaaagacnanntaattatatcttcaatnacaaaatnntattannncnnntaanataatanatttatanatctntatcannatantnantnntnn

SEQ ID NO: 228 - DNA, 853 bp, Homo Sapiens
tcgcatcaccatcaccatcacggatcctatttaggtgacactatagaatcgtcgacccacgcgtccgctcaggagcttgatccagacctctacaagcaaatggagaagttcaggaaggtacaaacacaagtgcgccttgcaaaaaaaaactttgacaaattgaagatggatgtttgtcaaaaagtggatcttcttggagcgagcagatgcaatctcttgtctcacatgctagcaacataccagaccactctgcttcatttttgggagaaaacttctcacactatggcagccatccatgagagtttcaaaggttatcaaccatatgaatttactactttaaagagcttacaagaccctatgaaaaaattagttgagaaagaagagaagaagaaaatcaaccagcaggaaagtacagatgcagccgtgcaggagccgagccaattaatttcattagaggaagaaaaccagcgcaaggaatcctctagttttaagactgaagatggaaaaagtattttatctgccttagacaaaggctctacacatactgcatgctcaggacccatagatgaactattagacatgaaatctgaggaaggtgcttgcctgggaccagtggcagggaccccggaacctgaaggtgctgacaaagatgacctgctgctgttgagtgagatcttcaatgcttcctccttggaagagggcgagttcagcaaagagtgggccgctgtgtttggagacggccagtgaaggagccagtgcccactatggccctgggagagccagaccccaaggcccagacaggctcaggtttccttccttcgcagcttttagaccaaaatatgaaagacttaca

SEQ ID NO: 229 - DNA, 1200 bp, Homo Sapiens
  misc_feature (1)..(1): n is a, c, g, or t
  misc_feature (783)..(783): n is a, c, g, or t
  misc_feature (832)..(832): n is a, c, g, or t
  misc_feature (834)..(834): n is a, c, g, or t
  misc_feature (845)..(845): n is a, c, g, or t
  misc_feature (847)..(847): n is a, c, g, or t
  misc_feature (873)..(873): n is a, c, g, or t
  misc_feature (914)..(914): n is a, c, g, or t
  misc_feature (919)..(919): n is a, c, g, or t
  misc_feature (947)..(947): n is a, c, g, or t
  misc_feature (949)..(949): n is a, c, g, or t
  misc_feature (988)..(988): n is a, c, g, or t
  misc_feature (992)..(992): n is a, c, g, or t
  misc_feature (997)..(997): n is a, c, g, or t
  misc_feature (1004)..(1004): n is a, c, g, or t
  misc_feature (1008)..(1008): n is a, c, g, or t
  misc_feature (1019)..(1019): n is a, c, g, or t
  misc_feature (1035)..(1035): n is a, c, g, or t
  misc_feature (1040)..(1040): n is a, c, g, or t
  misc_feature (1042)..(1043): n is a, c, g, or t
  misc_feature (1045)..(1045): n is a, c, g, or t
  misc_feature (1049)..(1049): n is a, c, g, or t
  misc_feature (1053)..(1053): n is a, c, g, or t
  misc_feature (1063)..(1063): n is a, c, g, or t
  misc_feature (1070)..(1070): n is a, c, g, or t
  misc_feature (1073)..(1073): n is a, c, g, or t
  misc_feature (1085)..(1086): n is a, c, g, or t
  misc_feature (1089)..(1089): n is a, c, g, or t
  misc_feature (1091)..(1091): n is a, c, g, or t
  misc_feature (1100)..(1100): n is a, c, g, or t
  misc_feature (1107)..(1108): n is a, c, g, or t
  misc_feature (1112)..(1112): n is a, c, g, or t
  misc_feature (1120)..(1120): n is a, c, g, or t
  misc_feature (1122)..(1122): n is a, c, g, or t
  misc_feature (1125)..(1125): n is a, c, g, or t
  misc_feature (1129)..(1130): n is a, c, g, or t
  misc_feature (1135)..(1135): n is a, c, g, or t
  misc_feature (1140)..(1140): n is a, c, g, or t
  misc_feature (1142)..(1143): n is a, c, g, or t
  misc_feature (1147)..(1147): n is a, c, g, or t
  misc_feature (1151)..(1151): n is a, c, g, or t
  misc_feature (1155)..(1156): n is a, c, g, or t
  misc_feature (1160)..(1160): n is a, c, g, or t
  misc_feature (1163)..(1163): n is a, c, g, or t
  misc_feature (1168)..(1168): n is a, c, g, or t
  misc_feature (1171)..(1171): n is a, c, g, or t
  misc_feature (1173)..(1176): n is a, c, g, or t
  misc_feature (1179)..(1179): n is a, c, g, or t
  misc_feature (1181)..(1183): n is a, c, g, or t
  misc_feature (1187)..(1188): n is a, c, g, or t
  misc_feature (1192)..(1194): n is a, c, g, or t
  misc_feature (1196)..(1196): n is a, c, g, or t
  misc_feature (1200)..(1200): n is a, c, g, or t
nttagagaaattactatgagaggatcgcatcaccatcaccatcacggatcctatttaggtgacactatagaatcgtcgacccacgcgtccggctggatccgcgcacacccagtggcggcggatgggcggccggggcggccggggcggccggtcctgagcgcggcccgggctgtcagggctggctgctggcgggatggacaccctggaggaggtgacttgggccaatgggagcacagcgctacccccacccctggcaccaaacatcagtgtgcctcatcgctgcctgctgctgctctacgaagacattggcacctccagggtccggtactgggacctcttgctgctcatccccaatgtgctcttcctcatcttcctgctctggaagcttccatctgctcgggcgaagatccgcatcacctccagccccatttttatcaccttctacatcctggtgtttgtggtggcgctggtgggcattgcccgggccgtggtatccatgacggtgagcacctcgaacgctgcaactgttgctgataagatcctgtgggagatcacccgcttcttcctgctggccatcgagctgagtgtgatcatcctgggcctggcctttggccacctggagagtaagtccagcatcaagcgggtgctggccatcaccacagtgctgtccctggcctactctgtcacccaggggaccctggagatcctgtaccctgatgcccatctctcagctgaggactttaatatctatggccatgggggccgccagttctggctggtcanctcctgcttcttcttcctggtctactctctggtggtcatccttcccaanancccgctgaagnancgcatctccctgccttctcggaagancttctacgtgtatgcgggcatcctggcactgctcaacctantgcangggctggggaatgtgctgctgtgcttcnanatcatcaaggggctctgctgtgtaaatgcaaaaaccttnctgnaattnaactttnttcnctccgctcatntaagtggctttcctcnggggntnntncggntcgnaacccaaaancttcttntcntaaaatgccaanntgnanaaaaaaaanaaccaanntaancctacccnanccntaanntttgncccgncnnaagncctnaaanntcanggnttttnggncnnnnttncnnntatnnaaannnantttn

SEQ ID NO: 230 - DNA, 1198 bp, Homo Sapiens
  misc_feature (37)..(37): n is a, c, g, or t
  misc_feature (894)..(894): n is a, c, g, or t
  misc_feature (916)..(916): n is a, c, g, or t
  misc_feature (944)..(944): n is a, c, g, or t
  misc_feature (951)..(951): n is a, c, g, or t
  misc_feature (967)..(967): n is a, c, g, or t
  misc_feature (973)..(973): n is a, c, g, or t
  misc_feature (977)..(977): n is a, c, g, or t
  misc_feature (996)..(996): n is a, c, g, or t
  misc_feature (1003)..(1003): n is a, c, g, or t
  misc_feature (1006)..(1006): n is a, c, g, or t
  misc_feature (1018)..(1018): n is a, c, g, or t
  misc_feature (1021)..(1021): n is a, c, g, or t
  misc_feature (1024)..(1024): n is a, c, g, or t
  misc_feature (1026)..(1026): n is a, c, g, or t
  misc_feature (1030)..(1030): n is a, c, g, or t
  misc_feature (1032)..(1032): n is a, c, g, or t
  misc_feature (1037)..(1037): n is a, c, g, or t
  misc_feature (1043)..(1043): n is a, c, g, or t
  misc_feature (1051)..(1053): n is a, c, g, or t
  misc_feature (1062)..(1062): n is a, c, g, or t
  misc_feature (1072)..(1072): n is a, c, g, or t
  misc_feature (1078)..(1078): n is a, c, g, or t
  misc_feature (1096)..(1097): n is a, c, g, or t
  misc_feature (1102)..(1102): n is a, c, g, or t
  misc_feature (1108)..(1108): n is a, c, g, or t
  misc_feature (1111)..(1112): n is a, c, g, or t
  misc_feature (1116)..(1118): n is a, c, g, or t
  misc_feature (1121)..(1121): n is a, c, g, or t
  misc_feature (1127)..(1127): n is a, c, g, or t
  misc_feature (1134)..(1134): n is a, c, g, or t
  misc_feature (1140)..(1140): n is a, c, g, or t
  misc_feature (1142)..(1142): n is a, c, g, or t
  misc_feature (1155)..(1155): n is a, c, g, or t
  misc_feature (1157)..(1157): n is a, c, g, or t
  misc_feature (1161)..(1161): n is a, c, g, or t
  misc_feature (1163)..(1163): n is a, c, g, or t
  misc_feature (1165)..(1165): n is a, c, g, or t
  misc_feature (1179)..(1179): n is a, c, g, or t
  misc_feature (1181)..(1181): n is a, c, g, or t
  misc_feature (1185)..(1186): n is a, c, g, or t
gattagagagaattactatgagaggatcgcatcaccntcaccatcacggatcctatttaggtgacactatagaatcgtcgacccacgcgtccgataaatccctggggccagtgtcattcaaggacgtggctgtggacttcacccaggaggaatggcagcagctggatcctgagcagaagataacttacagggatgtgatgctggagaactacagcaatctagtttctgtggggtatcacattatcaaaccggatgttatcagcaagttggagcaaggagaagagccatggatagtagaaggagaattcctacttcagagctatccagatgaagtctggcaaactgatgacctaatagagagaatccaggaagaggaaaataaaccttcaaggcaaactgtgttcattgagaccctgattgaagagagaggtaatgttcctggtaaaacttttgatgtagaaacgaaccctgttccttcaagaaaaatagcctataaaaatagcctctgtgactcatgtgaaaagtgtttaacgtctgtttcagaatatattagtagtgatggaagctatgcaagaatgaaagctgatgaatgtagtggatgtgggaaatcactcctccatattaagcttgagaaaactcatccaggagatcaagcttatgaatttaatcaaaatggggaaccttatactctaaatgaagaaagtctttatcagaaaattcgtattttggagaaaccttttgaatatattgaatgccagaaagccttccaaaaggacactgtttttgttaatcacatggaagaaaagccctataagtggaatggatctgaaatagcctttctccagatgtcggacctcactgtacatcagacatctcatatggaaatgaagcccntatgaatgcagtgaatgtgggnaatcccttctgtaaaaagtccaaatttnttatacntccgaggactcccccnggaaanaaanccttaccaatgtattccgnggggggnaanccctcctgccanaanggnancccntnactgngcctcnaaaaaacnnncccgggggnaaaacccctntgaatntaatgaatgggggaaaannttttnccaaanttnncccnnnttncccccncaaaaancccccncnggaaaaaaccccntnggangngntttttggggaaaancntttnnccaaaaaacccc

SEQ ID NO: 231 - DNA, 1200 bp, Homo Sapiens; identical to SEQ ID NO: 91
  misc_feature (730)..(730): n is a, c, g, or t
  misc_feature (834)..(834): n is a, c, g, or t
  misc_feature (865)..(865): n is a, c, g, or t
  misc_feature (870)..(870): n is a, c, g, or t
  misc_feature (872)..(872): n is a, c, g, or t
  misc_feature (875)..(875): n is a, c, g, or t
  misc_feature (878)..(878): n is a, c, g, or t
  misc_feature (902)..(902): n is a, c, g, or t
  misc_feature (909)..(909): n is a, c, g, or t
  misc_feature (911)..(911): n is a, c, g, or t
  misc_feature (918)..(918): n is a, c, g, or t
  misc_feature (924)..(924): n is a, c, g, or t
  misc_feature (936)..(936): n is a, c, g, or t
  misc_feature (939)..(939): n is a, c, g, or t
  misc_feature (942)..(942): n is a, c, g, or t
  misc_feature (948)..(948): n is a, c, g, or t
  misc_feature (954)..(954): n is a, c, g, or t
  misc_feature (957)..(957): n is a, c, g, or t
  misc_feature (962)..(962): n is a, c, g, or t
  misc_feature (967)..(967): n is a, c, g, or t
  misc_feature (969)..(969): n is a, c, g, or t
  misc_feature (971)..(971): n is a, c, g, or t
  misc_feature (976)..(976): n is a, c, g, or t
  misc_feature (980)..(980): n is a, c, g, or t
  misc_feature (987)..(987): n is a, c, g, or t
  misc_feature (992)..(992): n is a, c, g, or t
  misc_feature (999)..(999): n is a, c, g, or t
  misc_feature (1001)..(1001): n is a, c, g, or t
  misc_feature (1006)..(1006): n is a, c, g, or t
  misc_feature (1014)..(1014): n is a, c, g, or t
  misc_feature (1016)..(1016): n is a, c, g, or t
  misc_feature (1022)..(1022): n is a, c, g, or t
  misc_feature (1027)..(1027): n is a, c, g, or t
  misc_feature (1035)..(1035): n is a, c, g, or t
  misc_feature (1037)..(1037): n is a, c, g, or t
  misc_feature (1045)..(1045): n is a, c, g, or t
  misc_feature (1050)..(1050): n is a, c, g, or t
  misc_feature (1054)..(1054): n is a, c, g, or t
  misc_feature (1061)..(1062): n is a, c, g, or t
  misc_feature (1066)..(1066): n is a, c, g, or t
  misc_feature (1076)..(1076): n is a, c, g, or t
  misc_feature (1078)..(1078): n is a, c, g, or t
  misc_feature (1080)..(1080): n is a, c, g, or t
  misc_feature (1083)..(1083): n is a, c, g, or t
  misc_feature (1088)..(1088): n is a, c, g, or t
  misc_feature (1098)..(1098): n is a, c, g, or t
  misc_feature (1100)..(1101): n is a, c, g, or t
  misc_feature (1116)..(1118): n is a, c, g, or t
  misc_feature (1121)..(1121): n is a, c, g, or t
  misc_feature (1123)..(1123): n is a, c, g, or t
  misc_feature (1127)..(1127): n is a, c, g, or t
  misc_feature (1138)..(1138): n is a, c, g, or t
  misc_feature (1146)..(1146): n is a, c, g, or t
  misc_feature (1154)..(1154): n is a, c, g, or t
  misc_feature (1158)..(1158): n is a, c, g, or t
  misc_feature (1163)..(1163): n is a, c, g, or t
  misc_feature (1170)..(1170): n is a, c, g, or t
  misc_feature (1178)..(1179): n is a, c, g, or t
  misc_feature (1181)..(1181): n is a, c, g, or t
  misc_feature (1184)..(1184): n is a, c, g, or t
  misc_feature (1189)..(1190): n is a, c, g, or t
  misc_feature (1196)..(1198): n is a, c, g, or t
  misc_feature (1200)..(1200): n is a, c, g, or t

SEQ ID NO: 232 - DNA, 1198 bp, Homo Sapiens
  misc_feature (878)..(878): n is a, c, g, or t
  misc_feature (920)..(920): n is a, c, g, or t
  misc_feature (945)..(945): n is a, c, g, or t
  misc_feature (977)..(977): n is a, c, g, or t
  misc_feature (986)..(986): n is a, c, g, or t
  misc_feature (994)..(994): n is a, c, g, or t
  misc_feature (1021)..(1021): n is a, c, g, or t
  misc_feature (1030)..(1030): n is a, c, g, or t
  misc_feature (1036)..(1036): n is a, c, g, or t
  misc_feature (1039)..(1039): n is a, c, g, or t
  misc_feature (1048)..(1048): n is a, c, g, or t
  misc_feature (1050)..(1052): n is a, c, g, or t
  misc_feature (1057)..(1057): n is a, c, g, or t
  misc_feature (1071)..(1072): n is a, c, g, or t
  misc_feature (1080)..(1080): n is a, c, g, or t
  misc_feature (1082)..(1082): n is a, c, g, or t
  misc_feature (1085)..(1086): n is a, c, g, or t
  misc_feature (1088)..(1088): n is a, c, g, or t
  misc_feature (1091)..(1091): n is a, c, g, or t
  misc_feature (1108)..(1108): n is a, c, g, or t
  misc_feature (1110)..(1110): n is a, c, g, or t
  misc_feature (1113)..(1113): n is a, c, g, or t
  misc_feature (1124)..(1124): n is a, c, g, or t
  misc_feature (1126)..(1126): n is a, c, g, or t
  misc_feature (1137)..(1137): n is a, c, g, or t
  misc_feature (1139)..(1139): n is a, c, g, or t
  misc_feature (1144)..(1144): n is a, c, g, or t
  misc_feature (1147)..(1147): n is a, c, g, or t
  misc_feature (1153)..(1153): n is a, c, g, or t
  misc_feature (1155)..(1155): n is a, c, g, or t
  misc_feature (1161)..(1161): n is a, c, g, or t
  misc_feature (1164)..(1164): n is a, c, g, or t
  misc_feature (1167)..(1167): n is a, c, g, or t
  misc_feature (1171)..(1171): n is a, c, g, or t
  misc_feature (1173)..(1174): n is a, c, g, or t
  misc_feature (1177)..(1177): n is a, c, g, or t
  misc_feature (1179)..(1179): n is a, c, g, or t
  misc_feature (1181)..(1181): n is a, c, g, or t
  misc_feature (1184)..(1187): n is a, c, g, or t
  misc_feature (1189)..(1191): n is a, c, g, or t
ttagagaaattactatgagaggatcgcatcaccatcaccatcacggatcctatttaggtgacactatagaatcgtcgacccacgcgtccgggtctacaccgacttcgacggcacccgagtgtacagccccccggagtggatccgctaccaccgctaccacgggcgctcggccaccgtgtggtcgctgggcgtgcttctctacgatatggtgtgtggggacatccccttcgagcaggacgaggagatcctccgaggccgcctgctcttccggaggagggtctctccagagtgccagcagctgatccggtggtgcctgtccctgcggccctcagagcggccgtcgctggatcagattgcggcccatccctggatgctgggggctgacgggggcgccccggagagctgtgacctgcggctgtgcaccctcgaccctgatgacgtggccagcaccacgtccagcagcgagagcttgtgaggagctgcacctgactgggagctaggggaccacctgccttggccagacctgggacgcccccagaccctgactttttcctgcgtgggccgtctcctcctgcggaagcagtgacctctgacccctggtgaccttcgctttgagtgccttttgaacgctggtcccgcgggacttggttttctcaagctctgtctgtccaaagacgctccggtcgaggtcccgcctgccctgggtggatacttgaaccccagacgcccctctgtgctgctgtgtccggaggcggccttcccatctgcctgcccacccggagctctttccgccggcgcagggtcccaagcccacctcccgccctcagtcctgcggtgtgcgtctgggcacgtcctgcacacacaatgcaagtcctggnctccgcgcccgcccgcccaagcgagccgtacccgccgccaantctgttatttatggtgtgacccccntggaggtgcccttcggcccacgggggctattnattgttaanttaattgntgaggttatttcctctgaacaatctgnctttccaanccccanggnaaaatgggnannnaaggnaagggggtggcttnngtccaagnanccnngnccntaattcttggctgggtntntcntggcccccctntnaaaaaaaaaantntttanggntaattnangggaanggngancctnannttncngnatnnnncnnnggtttgg

SEQ ID NO: 233 - DNA, 875 bp, Homo Sapiens
gaggtcgcatcaccatcaccatcacggatcctatttaggtgacactatagaatcgtcgacccacgcgtccgggggaacagggcacacaggatatcaccgatgccagcgaaagggggctccacatgcagaagctggggtctgggtcagtgcaggctgcgctggcggagctggtggccctgccctgtctctttaccctgcagccacggccaagcgcagcccgagatgcccctcggataaagtggaccaaggtgcggactgcgtcgggccagcgacaggacttgcccatcctggtggccaaggacaatgtcgtgagggtggccaaaagctggcagggacgagtgtcactgccttcctacccccggcgccgagccaacgccacgctacttctggggccactgagggccagtgactctgggctgtaccgctgccaggtggtgaggggcatcgaggatgagcaggacctggtgcccttggaggtgacaggtgttgtgttccactaccgatcagcccgggaccgctatgcactgaccttcgctgaggcccaggaggcctgccgtctcagctcagccatcattgcagcccctcggcatctacaggctgcctttgaggatggctttgacaactgtgatgctggctggctctctgaccgcactgttcggtatcctatcacccagtcccgtcctggttgctatggcgaccgtagcagccttccaggggttcggagctatgggaggcgcaacccacaggaactctacgatgtgtattgctttgcccgggagctggggggcgaggtcttctacgtgggcccggcccgccgcctgacactggccggcgcgcgtgcacagtgccgccgccagggtgccgcgctggcctcg

SEQ ID NO: 234 - DNA, 1471 bp, Homo Sapiens
  misc_feature (294)..(294): n is a, c, g, or t
  misc_feature (352)..(352): n is a, c, g, or t
  misc_feature (372)..(372): n is a, c, g, or t
  misc_feature (453)..(453): n is a, c, g, or t
  misc_feature (480)..(480): n is a, c, g, or t
  misc_feature (623)..(623): n is a, c, g, or t
  misc_feature (680)..(680): n is a, c, g, or t
  misc_feature (696)..(696): n is a, c, g, or t
  misc_feature (704)..(704): n is a, c, g, or t
  misc_feature (715)..(715): n is a, c, g, or t
  misc_feature (722)..(722): n is a, c, g, or t
  misc_feature (732)..(732): n is a, c, g, or t
  misc_feature (742)..(743): n is a, c, g, or t
  misc_feature (753)..(753): n is a, c, g, or t
  misc_feature (764)..(764): n is a, c, g, or t
  misc_feature (767)..(767): n is a, c, g, or t
  misc_feature (770)..(770): n is a, c, g, or t
  misc_feature (780)..(780): n is a, c, g, or t
  misc_feature (803)..(803): n is a, c, g, or t
  misc_feature (806)..(806): n is a, c, g, or t
  misc_feature (811)..(811): n is a, c, g, or t
  misc_feature (819)..(819): n is a, c, g, or t
  misc_feature (822)..(822): n is a, c, g, or t
  misc_feature (826)..(827): n is a, c, g, or t
  misc_feature (831)..(831): n is a, c, g, or t
  misc_feature (835)..(837): n is a, c, g, or t
  misc_feature (858)..(858): n is a, c, g, or t
  misc_feature (865)..(865): n is a, c, g, or t
  misc_feature (874)..(874): n is a, c, g, or t
  misc_feature (883)..(883): n is a, c, g, or t
  misc_feature (885)..(885): n is a, c, g, or t
  misc_feature (887)..(887): n is a, c, g, or t
  misc_feature (890)..(890): n is a, c, g, or t
  misc_feature (892)..(892): n is a, c, g, or t
  misc_feature (897)..(897): n is a, c, g, or t
  misc_feature (899)..(899): n is a, c, g, or t
  misc_feature (919)..(919): n is a, c, g, or t
  misc_feature (922)..(922): n is a, c, g, or t
  misc_feature (928)..(928): n is a, c, g, or t
  misc_feature (933)..(934): n is a, c, g, or t
  misc_feature (936)..(937): n is a, c, g, or t
  misc_feature (945)..(945): n is a, c, g, or t
  misc_feature (947)..(948): n is a, c, g, or t
  misc_feature (950)..(950): n is a, c, g, or t
  misc_feature (961)..(961): n is a, c, g, or t
  misc_feature (963)..(965): n is a, c, g, or t
  misc_feature (975)..(976): n is a, c, g, or t
  misc_feature (979)..(980): n is a, c, g, or t
  misc_feature (988)..(988): n is a, c, g, or t
  misc_feature (995)..(995): n is a, c, g, or t
  misc_feature (997)..(998): n is a, c, g, or t
  misc_feature (1003)..(1003): n is a, c, g, or t
  misc_feature (1005)..(1005): n is a, c, g, or t
  misc_feature (1011)..(1011): n is a, c, g, or t
  misc_feature (1018)..(1019): n is a, c, g, or t
  misc_feature (1024)..(1024): n is a, c, g, or t
  misc_feature (1027)..(1027): n is a, c, g, or t
  misc_feature (1030)..(1031): n is a, c, g, or t
  misc_feature (1033)..(1033): n is a, c, g, or t
  misc_feature (1039)..(1040): n is a, c, g, or t
  misc_feature (1049)..(1049): n is a, c, g, or t
  misc_feature (1054)..(1054): n is a, c, g, or t
  misc_feature (1063)..(1063): n is a, c, g, or t
  misc_feature (1074)..(1075): n is a, c, g, or t
  misc_feature (1088)..(1090): n is a, c, g, or t
  misc_feature (1095)..(1095): n is a, c, g, or t
  misc_feature (1097)..(1101): n is a, c, g, or t
  misc_feature (1103)..(1103): n is a, c, g, or t
  misc_feature (1106)..(1107): n is a, c, g, or t
  misc_feature (1110)..(1112): n is a, c, g, or t
  misc_feature (1122)..(1123): n is a, c, g, or t
  misc_feature (1134)..(1134): n is a, c, g, or t
  misc_feature (1136)..(1136): n is a, c, g, or t
  misc_feature (1140)..(1140): n is a, c, g, or t
  misc_feature (1143)..(1143): n is a, c, g, or t
  misc_feature (1146)..(1146): n is a, c, g, or t
  misc_feature (1149)..(1149): n is a, c, g, or t
  misc_feature (1151)..(1151): n is a, c, g, or t
  misc_feature (1154)..(1154): n is a, c, g, or t
  misc_feature (1156)..(1156): n is a, c, g, or t
  misc_feature (1158)..(1159): n is a, c, g, or t
  misc_feature (1172)..(1172): n is a, c, g, or t
  misc_feature (1175)..(1175): n is a, c, g, or t
  misc_feature (1180)..(1180): n is a, c, g, or t
  misc_feature (1182)..(1182): n is a, c, g, or t
  misc_feature (1184)..(1184): n is a, c, g, or t
  misc_feature (1188)..(1188): n is a, c, g, or t
  misc_feature (1190)..(1190): n is a, c, g, or t
  misc_feature (1195)..(1195): n is a, c, g, or t
  misc_feature (1197)..(1197): n is a, c, g, or t
  misc_feature (1201)..(1201): n is a, c, g, or t
  misc_feature (1208)..(1208): n is a, c, g, or t
  misc_feature (1215)..(1215): n is a, c, g, or t
  misc_feature (1218)..(1218): n is a, c, g, or t
  misc_feature (1221)..(1221): n is a, c, g, or t
  misc_feature (1225)..(1227): n is a, c, g, or t
  misc_feature (1231)..(1231): n is a, c, g, or t
  misc_feature (1241)..(1241): n is a, c, g, or t
  misc_feature (1243)..(1243): n is a, c, g, or t
  misc_feature (1248)..(1248): n is a, c, g, or t
  misc_feature (1257)..(1257): n is a, c, g, or t
  misc_feature (1262)..(1263): n is a, c, g, or t
  misc_feature (1266)..(1266): n is a, c, g, or t
  misc_feature (1270)..(1270): n is a, c, g, or t
  misc_feature (1273)..(1273): n is a, c, g, or t
  misc_feature (1278)..(1278): n is a, c, g, or t
  misc_feature (1280)..(1280): n is a, c, g, or t
  misc_feature (1283)..(1283): n is a, c, g, or t
  misc_feature (1289)..(1290): n is a, c, g, or t
  misc_feature (1297)..(1297): n is a, c, g, or t
  misc_feature (1299)..(1300): n is a, c, g, or t
  misc_feature (1316)..(1317): n is a, c, g, or t
  misc_feature (1324)..(1324): n is a, c, g, or t
  misc_feature (1331)..(1332): n is a, c, g, or t
  misc_feature (1336)..(1338): n is a, c, g, or t
  misc_feature (1340)..(1340): n is a, c, g, or t
  misc_feature (1343)..(1343): n is a, c, g, or t
  misc_feature (1347)..(1347): n is a, c, g, or t
  misc_feature (1349)..(1349): n is a, c, g, or t
  misc_feature (1352)..(1352): n is a, c, g, or t
  misc_feature (1357)..(1357): n is a, c, g, or t
  misc_feature (1363)..(1364): n is a, c, g, or t
  misc_feature (1369)..(1369): n is a, c, g, or t
  misc_feature (1374)..(1375): n is a, c, g, or t
  misc_feature (1386)..(1386): n is a, c, g, or t
  misc_feature (1388)..(1388): n is a, c, g, or t
  misc_feature (1393)..(1393): n is a, c, g, or t
  misc_feature (1397)..(1397): n is a, c, g, or t
  misc_feature (1401)..(1401): n is a, c, g, or t
  misc_feature (1406)..(1406): n is a, c, g, or t
  misc_feature (1410)..(1410): n is a, c, g, or t
  misc_feature (1413)..(1414): n is a, c, g, or t
  misc_feature (1416)..(1418): n is a, c, g, or t
  misc_feature (1420)..(1420): n is a, c, g, or t
  misc_feature (1436)..(1436): n is a, c, g, or t
  misc_feature (1438)..(1438): n is a, c, g, or t
  misc_feature (1453)..(1453): n is a, c, g, or t
  misc_feature (1455)..(1455): n is a, c, g, or t
  misc_feature (1457)..(1458): n is a, c, g, or t
  misc_feature (1463)..(1463): n is a, c, g, or t
agagagattactatgagaggatcgcatcaccatcaccatcacggatcctatttaggtgacactatagaatcgtcgacccacgcgtccggcggaccccagagagccctgagcagccccaccgccgccgccggcctagttaccatcacaccccgggaggagccgcagctgccgcagccggccccagtcaccatcaccgcaaccatgagcagcgaggccgagacccagcagccgcccgccgccccccccgccgcccccgccctcagcgccgccgacaccaagcccggcactacgggnagcggcgcagggagcggtggcccgggcggcctcacatcggcggcgcctgccggcgggnacaagaaggtcatcgcaacnaaggttttgggaacagtaaaatggttcaatgtaaggaacggatatggtttcatcaacaggaatgacaccaaggaagatgtntttgtacaccagactgccataaagaanaataaccccaggaagtaccttcgcagtgtaggagatggagagactgtggagtttgatgttgttgaaggagaaaagggtgcggaggcagcaaaatgttacaggtcctggtggtgttccagttcaaggcagtaaatatgcagcanaccgtaaccattatagacgctatccacgttcggtagggggtcctccacgcaattacnaggcaaaattaccatnaatagtgntagtggggaanaagaacnagggattcgnaagagtgctnncgaatgccangcccaaataanttnggntccctaccgnaagcgaaaggttcccacctttanttnatgcngaaaaccntangggnngtcntacnnnattattccaacccttcttgtncaggganaaaatgatngaagggtgntnancantnaaggntncatgaaaaaaaatgtaaaancantgaggnataanntnnaatggggntnntngctctttattncnnnagggcccctnnttnntcaaaaancttcttnannaggtngntcattngaaaaanntcttnaantcnntnggaatnnataccttangggtnaaaatccancttaaattcgnnacgtccaaatttnnntttcngnnnnngnacnnctnnnaattttttcnntttaatttaananaaanaanccnccncnttncncnnttaaaaatttctnccnctccngntntaanangaggngntaanatatttnggggttnacnttntttnnnaacnagagtttacntncacanaaaataatnttgannttnttcntanaaatnancanattggnnttacccntnngtgtgtttttttcccnnaaactanaaaaatnngttnnncnagngtgntnttnttttnaaaaannttttnaaaanngttttttaaangnttttncttntaanttaantttntanngnnntntaccttatttattcantnatttttttcatatantncnngttanttttaaaa

SEQ ID NO: 235 - DNA, 1179 bp, Homo Sapiens
  misc_feature (349)..(349): n is a, c, g, or t
  misc_feature (357)..(357): n is a, c, g, or t
  misc_feature (368)..(368): n is a, c, g, or t
  misc_feature (412)..(412): n is a, c, g, or t
  misc_feature (422)..(422): n is a, c, g, or t
  misc_feature (439)..(440): n is a, c, g, or t
  misc_feature (443)..(443): n is a, c, g, or t
  misc_feature (472)..(472): n is a, c, g, or t
  misc_feature (476)..(476): n is a, c, g, or t
  misc_feature (483)..(484): n is a, c, g, or t
  misc_feature (493)..(494): n is a, c, g, or t
  misc_feature (509)..(509): n is a, c, g, or t
  misc_feature (519)..(519): n is a, c, g, or t
  misc_feature (532)..(533): n is a, c, g, or t
  misc_feature (536)..(536): n is a, c, g, or t
  misc_feature (555)..(555): n is a, c, g, or t
  misc_feature (565)..(566): n is a, c, g, or t
  misc_feature (570)..(570): n is a, c, g, or t
  misc_feature (572)..(572): n is a, c, g, or t
  misc_feature (588)..(588): n is a, c, g, or t
  misc_feature (590)..(590): n is a, c, g, or t
  misc_feature (595)..(598): n is a, c, g, or t
  misc_feature (606)..(607): n is a, c, g, or t
  misc_feature (609)..(609): n is a, c, g, or t
  misc_feature (612)..(612): n is a, c, g, or t
  misc_feature (614)..(614): n is a, c, g, or t
  misc_feature (617)..(617): n is a, c, g, or t
  misc_feature (624)..(624): n is a, c, g, or t
  misc_feature (628)..(629): n is a, c, g, or t
  misc_feature (631)..(631): n is a, c, g, or t
  misc_feature (634)..(636): n is a, c, g, or t
  misc_feature (639)..(639): n is a, c, g, or t
  misc_feature (647)..(647): n is a, c, g, or t
  misc_feature (649)..(649): n is a, c, g, or t
  misc_feature (652)..(653): n is a, c, g, or t
  misc_feature (657)..(657): n is a, c, g, or t
  misc_feature (675)..(675): n is a, c, g, or t
  misc_feature (686)..(687): n is a, c, g, or t
  misc_feature (690)..(690): n is a, c, g, or t
  misc_feature (695)..(695): n is a, c, g, or t
  misc_feature (704)..(704): n is a, c, g, or t
  misc_feature (710)..(711): n is a, c, g, or t
  misc_feature (714)..(714): n is a, c, g, or t
  misc_feature (722)..(722): n is a, c, g, or t
  misc_feature (724)..(724): n is a, c, g, or t
  misc_feature (734)..(737): n is a, c, g, or t
  misc_feature (739)..(739): n is a, c, g, or t
  misc_feature (745)..(746): n is a, c, g, or t
  misc_feature (748)..(748): n is a, c, g, or t
  misc_feature (756)..(756): n is a, c, g, or t
  misc_feature (759)..(759): n is a, c, g, or t
  misc_feature (766)..(766): n is a, c, g, or t
  misc_feature (776)..(777): n is a, c, g, or t
  misc_feature (789)..(789): n is a, c, g, or t
  misc_feature (791)..(791): n is a, c, g, or t
  misc_feature (793)..(793): n is a, c, g, or t
  misc_feature (797)..(797): n is a, c, g, or t
  misc_feature (801)..(808): n is a, c, g, or t
  misc_feature (810)..(810): n is a, c, g, or t
  misc_feature (818)..(818): n is a, c, g, or t
  misc_feature (822)..(823): n is a, c, g, or t
  misc_feature (845)..(847): n is a, c, g, or t
  misc_feature (857)..(857): n is a, c, g, or t
  misc_feature (865)..(866): n is a, c, g, or t
  misc_feature (874)..(874): n is a, c, g, or t
  misc_feature (876)..(876): n is a, c, g, or t
  misc_feature (883)..(883): n is a, c, g, or t
  misc_feature (891)..(892): n is a, c, g, or t
  misc_feature (903)..(905): n is a, c, g, or t
  misc_feature (908)..(909): n is a, c, g, or t
  misc_feature (919)..(919): n is a, c, g, or t
  misc_feature (925)..(925): n is a, c, g, or t
  misc_feature (938)..(939): n is a, c, g, or t
  misc_feature (941)..(942): n is a, c, g, or t
  misc_feature (945)..(948): n is a, c, g, or t
  misc_feature (968)..(968): n is a, c, g, or t
  misc_feature (970)..(970): n is a, c, g, or t
  misc_feature (974)..(975): n is a, c, g, or t
  misc_feature (981)..(981): n is a, c, g, or t
  misc_feature (985)..(985): n is a, c, g, or t
  misc_feature (993)..(993): n is a, c, g, or t
  misc_feature (996)..(996): n is a, c, g, or t
  misc_feature (1009)..(1009): n is a, c, g, or t
  misc_feature (1012)..(1012): n is a, c, g, or t
  misc_feature (1015)..(1015): n is a, c, g, or t
  misc_feature (1018)..(1018): n is a, c, g, or t
  misc_feature (1033)..(1033): n is a, c, g, or t
  misc_feature (1035)..(1035): n is a, c, g, or t
  misc_feature (1051)..(1055): n is a, c, g, or t
  misc_feature (1061)..(1062): n is a, c, g, or t
  misc_feature (1064)..(1068): n is a, c, g, or t
  misc_feature (1073)..(1073): n is a, c, g, or t
  misc_feature (1082)..(1082): n is a, c, g, or t
  misc_feature (1092)..(1092): n is a, c, g, or t
  misc_feature (1103)..(1103): n is a, c, g, or t
  misc_feature (1108)..(1108): n is a, c, g, or t
  misc_feature (1110)..(1110): n is a, c, g, or t
  misc_feature (1126)..(1126): n is a, c, g, or t
  misc_feature (1128)..(1129): n is a, c, g, or t
  misc_feature (1141)..(1147): n is a, c, g, or t
  misc_feature (1155)..(1155): n is a, c, g, or t
  misc_feature (1157)..(1157): n is a, c, g, or t
  misc_feature (1169)..(1172): n is a, c, g, or t
  misc_feature (1174)..(1174): n is a, c, g, or t
  misc_feature (1176)..(1176): n is a, c, g, or t
  misc_feature (1178)..(1179): n is a, c, g, or t
gagaaattactatgagaggatcgcatcaccatcaccatcacggatcctatttaggtgacactatagaatcgtcgacccacgcgtccgtgaataagtcgtcctacaaatatgaagcagacacggtggacctgaattggtgcgtcatttccgacatggaagtcatcgagctgaacaaatgcacctcgggccaatcctttgaagtcatcctgaagccaccctcctttgatggggttcccgagttcaacgcctccctgccaaggcggcgagacccatccctggaagagatccagaagaaactagaagcggctgaggagcgaaggaagtaccaggaagcggagctcctgaaccncttagcanagaaacgggancatgagagagagtgatccaaaggccattgaggaaaacacaactncttcagatgntaaagaaaaactggccnnaanatggattccaccaggaaacgggaggcccnctcnccccctnnttgaaacgnngcaaaaaaggaaaanccccccaagnggggggaaaaaannggncctttaaggaaaaaggccncccggttaanncctnanggcccaaaaaattttncnggttnnnnggggaaanntnccnanaantttcccntttnnanggnnnccntccccccngnggnngggntttccccaaaatgggggntttttgggggnnggnggggngggcccaangggggnnttncccccccntnttttgggggnnnngnccccgnntnaaaaaaanggnccccggngaaccccccnntttttttttttntncngggnaaannnnnnnngngggggggnaaannggaaaaaaaaaaaaattttttnnnaaaagggggntttttggnnaaaaaaantntgggggntttttttnnccccccccccnnnggnnaaaaaaaaantttttnccccccccccccnncnnaannnntgcccccccccccccccccntntttnngggaanaaanaaaaaaanacngggggggggaaanttnttntgngggaagaaaaaaaancntttttggggggggggnnnnntttttnngnnnnnccccnaaaaaaaancccccccagnggggggggggngaacncnccggggggggtttttntnncccccccccccnnnnnnnaaaaaaananttttttttgtgnnnnanancnn

SEQ ID NO: 236 - DNA, 766 bp, Homo Sapiens
  misc_feature (519)..(519): n is a, c, g, or t
  misc_feature (667)..(667): n is a, c, g, or t
  misc_feature (763)..(763): n is a, c, g, or t
agaaattactatgagaggatcgcatcaccatcaccatcacggatcctatttaggtgacactatagaatcgtcgacccacgcgtccggagaagaggacggctgccacccttgccacccacgagctccgtgccgtcaaagggcccctgctgtactgcgcccggcccccacaggacctcaagattgtccccttggggcggaaagaagccaaggccaaggagctggtgcggcagctgcagctggaggccgaggagcagaggaagcagaagaagcggcagagtgtgtcgggcctgcacagataccttcacttgctggatggaaatgaaaattacccgtgtcttgtggatgcagacggtgatgtgatttccttcccaccaataaccaacagtgagaagacaaaggttaagaaaacgacttctgatttgtttttggaagtaacaagtgccaccagtctgcagatttgcaaggatgtcatggatgccctcattctgaaaatggcagaaatgaaaaagtacactttanaaaataaagaggaaggatcactctcagatactgaagccgatgcagtctctggacaacttccagatcccacaacgaatcccagtgctggaaaggacgggccctcccttctggtggtggagcaggtccgggtggtggatctggaagggancctgaaggtggtgtacccgtccaaaggcccgacctggccactgccccctccccacgtgactgtcgtgcgctgaacccaggggcccgccctgtcccncgt

SEQ ID NO: 237 - DNA, 1403 bp, Homo Sapiens
  misc_feature (783)..(783): n is a, c, g, or t
  misc_feature (789)..(789): n is a, c, g, or t
  misc_feature (797)..(797): n is a, c, g, or t
  misc_feature (840)..(840): n is a, c, g, or t
  misc_feature (842)..(842): n is a, c, g, or t
  misc_feature (873)..(873): n is a, c, g, or t
  misc_feature (894)..(894): n is a, c, g, or t
  misc_feature (899)..(899): n is a, c, g, or t
  misc_feature (902)..(902): n is a, c, g, or t
  misc_feature (911)..(911): n is a, c, g, or t
  misc_feature (936)..(936): n is a, c, g, or t
  misc_feature (940)..(940): n is a, c, g, or t
  misc_feature (951)..(951): n is a, c, g, or t
  misc_feature (957)..(957): n is a, c, g, or t
  misc_feature (960)..(960): n is a, c, g, or t
  misc_feature (976)..(976): n is a, c, g, or t
  misc_feature (983)..(983): n is a, c, g, or t
  misc_feature (986)..(986): n is a, c, g, or t
  misc_feature (1016)..(1016): n is a, c, g, or t
  misc_feature (1018)..(1018): n is a, c, g, or t
  misc_feature (1021)..(1021): n is a, c, g, or t
  misc_feature (1025)..(1025): n is a, c, g, or t
  misc_feature (1028)..(1028): n is a, c, g, or t
  misc_feature (1032)..(1032): n is a, c, g, or t
  misc_feature (1037)..(1037): n is a, c, g, or t
  misc_feature (1039)..(1039): n is a, c, g, or t
  misc_feature (1043)..(1043): n is a, c, g, or t
  misc_feature (1047)..(1047): n is a, c, g, or t
  misc_feature (1059)..(1059): n is a, c, g, or t
  misc_feature (1061)..(1061): n is a, c, g, or t
  misc_feature (1063)..(1063): n is a, c, g, or t
  misc_feature (1067)..(1067): n is a, c, g, or t
  misc_feature (1079)..(1079): n is a, c, g, or t
  misc_feature (1082)..(1082): n is a, c, g, or t
  misc_feature (1092)..(1092): n is a, c, g, or t
  misc_feature (1107)..(1108): n is a, c, g, or t
  misc_feature (1111)..(1112): n is a, c, g, or t
  misc_feature (1115)..(1115): n is a, c, g, or t
  misc_feature (1119)..(1120): n is a, c, g, or t
  misc_feature (1124)..(1125): n is a, c, g, or t
  misc_feature (1135)..(1135): n is a, c, g, or t
  misc_feature (1139)..(1140): n is a, c, g, or t
  misc_feature (1150)..(1150): n is a, c, g, or t
  misc_feature (1158)..(1158): n is a, c, g, or t
  misc_feature (1164)..(1164): n is a, c, g, or t
  misc_feature (1168)..(1168): n is a, c, g, or t
  misc_feature (1179)..(1179): n is a, c, g, or t
  misc_feature (1182)..(1182): n is a, c, g, or t
  misc_feature (1184)..(1185): n is a, c, g, or t
  misc_feature (1190)..(1190): n is a, c, g, or t
  misc_feature (1192)..(1192): n is a, c, g, or t
  misc_feature (1199)..(1199): n is a, c, g, or t
  misc_feature (1203)..(1203): n is a, c, g, or t
  misc_feature (1214)..(1214): n is a, c, g, or t
  misc_feature (1220)..(1220): n is a, c, g, or t
  misc_feature (1224)..(1225): n is a, c, g, or t
  misc_feature (1228)..(1228): n is a, c, g, or t
  misc_feature (1231)..(1232): n is a, c, g, or t
  misc_feature (1234)..(1234): n is a, c, g, or t
  misc_feature (1245)..(1246): n is a, c, g, or t
  misc_feature (1252)..(1252): n is a, c, g, or t
  misc_feature (1254)..(1254): n is a, c, g, or t
  misc_feature (1267)..(1270): n is a, c, g, or t
  misc_feature (1275)..(1276): n is a, c, g, or t
  misc_feature (1279)..(1279): n is a, c, g, or t
  misc_feature (1283)..(1284): n is a, c, g, or t
  misc_feature (1288)..(1289): n is a, c, g, or t
  misc_feature (1293)..(1294): n is a, c, g, or t
  misc_feature (1304)..(1304): n is a, c, g, or t
  misc_feature (1307)..(1307): n is a, c, g, or t
  misc_feature (1309)..(1309): n is a, c, g, or t
  misc_feature (1311)..(1313): n is a, c, g, or t
  misc_feature (1317)..(1317): n is a, c, g, or t
  misc_feature (1328)..(1328): n is a, c, g, or t
  misc_feature (1344)..(1344): n is a, c, g, or t
  misc_feature (1346)..(1346): n is a, c, g, or t
  misc_feature (1352)..(1352): n is a, c, g, or t
  misc_feature (1363)..(1363): n is a, c, g, or t
  misc_feature (1367)..(1367): n is a, c, g, or t
  misc_feature (1378)..(1378): n is a, c, g, or t
  misc_feature (1380)..(1381): n is a, c, g, or t
tagaggaaaataactatgaagaggatcgcatcaccatcaccatcacggatcctatttaggtgacactatagaatcgtcgacccacgcgtccgcccacgcgtccgcggcaggcggcggaggctccgcggtgtcggtgctggccccgaacggccggcgccacacggtgaaggtgacgccgagcaccgtgctgcttcaggttctggaggacacgtgccggcggcaggacttcaacccctgtgaatatgatctgaagtttcagaggagcgtgctcgacctttctctccagtggagatttgccaacctgcccaacaatgccaagctggagatggtgcccgcttcccggagccgtgaggggcctgagaacatggttcgcatcgctttgcagctggacgatggctcgaggttgcaggactctttctgttcaggccagaccctctgggagcttctcagccattttccacagatcagggagtgcctgcagcaccccggcggggcaccccagtctgcgtgtacacgagggatgaggtgacgggtgaagctgccctgcggggcacgacgctgcagtcgctgggcctgaccgggggcagcgccaccatcaggtttgtcatgaagtgctacgaccccgtgggcaagaccccaggaagcctgggctcgtcagcgtcggctggccaggcagccgccagcgctccacttcccttggaatctggggagctcagccgcggcgacttgagccgtccggaggacgcggacacctcagggccctgctgcgagcacactcagganaagcanagcacaanggcacccgcagctgccccctttgttccttttctcgggtggggnanaagaaactggggggccctcctgggcccaacnaggcctctgaacatcatcttnagctnaanttgccaaantccctctccaaccctggaagccccntccnaaccaaaaaantccaantcngggccaggatccccancagggancangaacaggaaccgggaacgggtatccccacnangancaanaancggnaaccngncccnttgnacccggaacccntngnaacnggaaaccgggtntgntccacccccnaaccttgaaaaaaannttnnagncttnnccannagaaattccntaannaatttttttnacctaaangggaanaaanttaaaaaaacnttngnnccatntnaaaaatnaacngaaaccccttnaaaaancccnnttntgnnancaagccttttnngagaancnaaaaaaataaaannnnaaccnnacnaaanngttnntaanntcttttcccnaancnannntatnaaagttttttncccccacaaaaaaagngnatattntaaaaattttnaaanaccctggaaancnnttttttttattgtttcccccca

SEQ ID NO: 238 - DNA, 699 bp, Homo Sapiens
ggctcgcatcaccatcaccatcacggatcctatttaggtgacactatagaatcgtcgacccacgcgtccggcgtggggccgcgcgtctggacgtccctcgcgtcgggcccgacagcgcctgcgcactgcgccgccggctggggtgctgggggcggggcaggggcaggtgtagcctctgtgcctcgttgtcccctggcgctacccggacatctctcagggtgccggcaccatgaagatctggacttcggagcacgtctttgaccacccgtgggaaactgttacaacagctgcaatgcagaaatacccaaaccctatgaacccaagtgtggttggagttgatgtgttggacagacatatagatccctctggaaagttgcacagccacagacttctcagcacagagtggggactgccttccattgtgaagtctcttattggtgcagcaagaacgaaaacatatgtgcaagaacattctgtagttgatcctgtagagaaaacaatggaacttaaatctactaatatttcatttacaaacatggtttcagtagatgagagacttatatacaaaccacatcctcaggatccagaaaaaactgttttgacacaagaagccataattaccgtgaaaggagttagcctcagcagttaccttgaaggactgatggcaagtacgatatcctcaaatgctagtaaaggccg

SEQ ID NO: 239 - DNA, 870 bp, Homo Sapiens
  misc_feature (781)..(781): n is a, c, g, or t
  misc_feature (810)..(810): n is a, c, g, or t
  misc_feature (843)..(843): n is a, c, g, or t
  misc_feature (866)..(866): n is a, c, g, or t
aattagagaaattactatgagaggatcgcatcaccatcaccatcacggatcctatttaggtgacactatagaatcgtcgacccacgcgtccgatcaaaacgaggacgaacccattcgtgttagctaccatcggaatatccactataattcagtggtgaatcctaacaaggccaccattggtgtggggctgggcctgccatcattcaaaccagggtttgcagagcagtctctgatgaagaatgccataaaaacatcggaggagtcatggattgaacagcagatgctagaagacaagaaacgggccacagactgggaggccacaaatgaagccatcgaggagcaggtggctcgggaatcctacctgcagtggttgcgggatcaggagaaacaggctcgccaggtccgaggccccagccagccccggaaagccagcgccacatgcagttcggccacagcagcagcctccagtggcctggaggagtggactagccggtccccgcggcagcggagttcagcctcgtcacctgagcaccctgagctgcatgctgaattgggcatgaagcccccttccccaggcactgttttagctcttgccaaacctccttcgccctgtgcgccaggtacaagcagtcagttctcggcaggggccgaccgggcaacttccccccttgtgtccctctaccctgctttggagtgccgggccctcattcagcagatgtccccctctgcctttggtaagcctcctttgtctggggggatggaggctgctaggagctggganagactggaagaagtggcaagtcctgaaangggctttctggagcctctggccatctccccaanaaaagaagggagaggcactgganggga

SEQ ID NO: 240 - DNA, 1268 bp, Homo Sapiens
  misc_feature (709)..(709): n is a, c, g, or t
  misc_feature (714)..(714): n is a, c, g, or t
  misc_feature (748)..(748): n is a, c, g, or t
  misc_feature (760)..(760): n is a, c, g, or t
  misc_feature (765)..(765): n is a, c, g, or t
  misc_feature (772)..(772): n is a, c, g, or t
  misc_feature (775)..(775): n is a, c, g, or t
  misc_feature (785)..(785): n is a, c, g, or t
  misc_feature (798)..(798): n is a, c, g, or t
  misc_feature (802)..(802): n is a, c, g, or t
  misc_feature (810)..(810): n is a, c, g, or t
  misc_feature (817)..(817): n is a, c, g, or t
  misc_feature (821)..(821): n is a, c, g, or t
  misc_feature (824)..(824): n is a, c, g, or t
  misc_feature (827)..(827): n is a, c, g, or t
  misc_feature (831)..(831): n is a, c, g, or t
  misc_feature (834)..(834): n is a, c, g, or t
  misc_feature (838)..(838): n is a, c, g, or t
  misc_feature (843)..(843): n is a, c, g, or t
  misc_feature (854)..(854): n is a, c, g, or t
  misc_feature (856)..(856): n is a, c, g, or t
  misc_feature (861)..(861): n is a, c, g, or t
  misc_feature (874)..(875): n is a, c, g, or t
  misc_feature (880)..(880): n is a, c, g, or t
  misc_feature (882)..(882): n is a, c, g, or t
  misc_feature (893)..(894): n is a, c, g, or t
  misc_feature (903)..(903): n is a, c, g, or t
  misc_feature (906)..(906): n is a, c, g, or t
  misc_feature (913)..(913): n is a, c, g, or t
  misc_feature (915)..(915): n is a, c, g, or t
  misc_feature (919)..(920): n is a, c, g, or t
  misc_feature (925)..(925): n is a, c, g, or t
  misc_feature (928)..(928): n is a, c, g, or t
  misc_feature (930)..(931): n is a, c, g, or t
  misc_feature (938)..(939): n is a, c, g, or t
  misc_feature (943)..(943): n is a, c, g, or t
  misc_feature (946)..(946): n is a, c, g, or t
  misc_feature (952)..(953): n is a, c, g, or t
  misc_feature (955)..(956): n is a, c, g, or t
  misc_feature (960)..(961): n is a, c, g, or t
  misc_feature (971)..(971): n is a, c, g, or t
  misc_feature (980)..(980): n is a, c, g, or t
  misc_feature (990)..(992): n is a, c, g, or t
  misc_feature (994)..(994): n is a, c, g, or t
  misc_feature (996)..(996): n is a, c, g, or t
  misc_feature (1001)..(1001): n is a, c, g, or t
  misc_feature (1003)..(1003): n is a, c, g, or t
  misc_feature (1005)..(1005): n is a, c, g, or t
  misc_feature (1012)..(1013): n is a, c, g, or t
  misc_feature (1016)..(1020): n is a, c, g, or t
  misc_feature (1028)..(1029): n is a, c, g, or t
  misc_feature (1032)..(1032): n is a, c, g, or t
  misc_feature (1038)..(1041): n is a, c, g, or t
  misc_feature (1045)..(1046): n is a, c, g, or t
  misc_feature (1048)..(1051): n is a, c, g, or t
  misc_feature (1054)..(1063): n is a, c, g, or t
  misc_feature (1067)..(1068): n is a, c, g, or t
  misc_feature (1077)..(1079): n is a, c, g, or t
  misc_feature (1085)..(1095): n is a, c, g, or t
  misc_feature (1104)..(1104): n is a, c, g, or t
  misc_feature (1108)..(1108): n is a, c, g, or t
  misc_feature (1110)..(1110): n is a, c, g, or t
  misc_feature (1112)..(1112): n is a, c, g, or t
  misc_feature (1115)..(1118): n is a, c, g, or t
  misc_feature (1121)..(1121): n is a, c, g, or t
  misc_feature (1126)..(1127): n is a, c, g, or t
  misc_feature (1130)..(1134): n is a, c, g, or t
  misc_feature (1138)..(1138): n is a, c, g, or t
  misc_feature (1140)..(1141): n is a, c, g, or t
  misc_feature (1143)..(1148): n is a, c, g, or t
  misc_feature (1154)..(1163): n is a, c, g, or t
  misc_feature (1167)..(1171): n is a, c, g, or t
  misc_feature (1173)..(1194): n is a, c, g, or t
  misc_feature (1196)..(1197): n is a, c, g, or t
  misc_feature (1203)..(1209): n is a, c, g, or t
  misc_feature (1212)..(1212): n is a, c, g, or t
  misc_feature (1216)..(1217): n is a, c, g, or t
  misc_feature (1221)..(1233): n is a, c, g, or t
  misc_feature (1236)..(1255): n is a, c, g, or t
  misc_feature (1258)..(1267): n is a, c, g, or t
gagaaattactatgagaggatcgcatcaccatcaccatcacggatcctatttaggtgacactatagaatcgtcgacccacgcgtccgctcctccagtgctgtgcgcatggcagtgggctgcctgctggagctggccttcaaggtggctgcaggagagctcaagaatggatttgccatcatccggcccccaggacaccacgccgaggaatccacagccatgggattctgcttcttcaactctgtagccatcaccgcaaaactcctacagcagaagttgaacgtgggcaaggtcctcatcgtggactgggacattcaccatggcaatggcacccagcaggcgttctacaatgacccctctgtgctctacatctctctgcatcgctatgacaacgggaacttctttccaggctctggggctcctgaagaggttggtggaggaccaggcgtggggtacaatgtgaacgtggcatggacaggaggtgtggacccccccattggagacgtggagtaccttacagccttcaggacagtggtgatgcccattgcccacgagttctcacctgatgtggtcctagtctccgccgggtttgatgctgttgaaggacatctgtctcctctgggtggctactctgtcaccgccagatgttttggccacttgaccaggcagctgatgaccctggcagggggccgggtggtgctggccctgganggagnccatgacttgaccgccatctgtgatgcctctgangcttgtgtctcnggctntgctcantgnaaaactgcancccttggaatgangcantcttgcancaaaaancccnaanatncacncantggnccacnctaaaaaaaantncttcnaaaattccaaaannaaaancntggaaacttgnntgcaaaaanttnccccccntngttnntgggnccngnncccttgnnaaanggnccccanncnngggnnaaaaaccaangaaggcccnaaaaaatttnnnancnccccntngnccctttnnttnnnnngggggggnnccnaaaaannnncccnnannnnttnnnnnnnnnncccnngaaaaaaannncccccnnnnnnnnnnnaaaaaaaancccntngnaannnnaanccccnnccnnnnngaananncnnnnnnccccannnnnnnnnngggnnnnncnnnnnnnnnnnnnnnnnnnnnnanntttttnnnnnnnaanaaannaaannnnnnnnnnnnnttnnnnnnnnnnnnnnnnnnnnggnnnnnnnnnnc

SEQ ID NO: 241 - DNA, 948 bp, Homo Sapiens
ttaactatgagaggatcgcatcaccatcaccatcacggatcctatttaggtgacactatagaatcgtcgacccacgcgtccgctagttctagatcgcgagcggccctgaagcagcctccggcgccccctccgccacccccgccagtgtcggcgcccgcggccgaggccgcgccccccgcctccgccgccactatcgccgcggcggcggccaccgccgtcgtagccccaacctcgacggtcgccgtggccccggtcgcgtctgccttggagaagaagacaaagagcaaggggccctacatctgcgctctgtgcgccaaggagttcaagaacggctacaatctccggaggcacgaagccatccacacgggagccaaggccggccgggtcccctcgggtgctatgaagatgccgaccatggtgcccctgagcctcctgagcgtgccccagctgagcggagccggcgggggagggggagaggcgggtgccggcggcggcgctgccgcagtggccgccggtggcgtggtgaccacgaccgcctcggggaagcgcatccggaagaaccatgcctgcgagatgtgtggcaaggccttccgcgacgtctaccacctgaaccgacacaagctgtcgcactcggacgagaagccctaccagtgcccggtgtgccagcagcgcttcaagcgcaaggaccgcatgagctaccacgtgcgctcacatgacggcgctgtgcacaagccctacaactgctcccactgtggcaagagcttctcccggccggatcacctcaacagtcacgtcagacaagtgcactcaacagaacggcccttcaaatgtgagaaatgtgaggcagctttcgccacgaaggatcggctgcgggcgcacacagtacgacacgaggagaaagtgccatgtcacgtgtgtggcaagatgctgagctcggcttatatttcc

SEQ ID NO: 242 - DNA, 1194 bp, Homo Sapiens
  misc_feature (886)..(886): n is a, c, g, or t
  misc_feature (913)..(913): n is a, c, g, or t
  misc_feature (922)..(922): n is a, c, g, or t
  misc_feature (971)..(971): n is a, c, g, or t
  misc_feature (986)..(986): n is a, c, g, or t
  misc_feature (994)..(994): n is a, c, g, or t
  misc_feature (1000)..(1002): n is a, c, g, or t
  misc_feature (1007)..(1020): n is a, c, g, or t
  misc_feature (1031)..(1031): n is a, c, g, or t
  misc_feature (1033)..(1033): n is a, c, g, or t
  misc_feature (1038)..(1038): n is a, c, g, or t
  misc_feature (1042)..(1042): n is a, c, g, or t
  misc_feature (1046)..(1046): n is a, c, g, or t
  misc_feature (1048)..(1049): n is a, c, g, or t
  misc_feature (1061)..(1061): n is a, c, g, or t
  misc_feature (1063)..(1063): n is a, c, g, or t
  misc_feature (1095)..(1096): n is a, c, g, or t
  misc_feature (1101)..(1101): n is a, c, g, or t
  misc_feature (1112)..(1112): n is a, c, g, or t
  misc_feature (1117)..(1118): n is a, c, g, or t
  misc_feature (1121)..(1121): n is a, c, g, or t
  misc_feature (1130)..(1130): n is a, c, g, or t
  misc_feature (1154)..(1155): n is a, c, g, or t
  misc_feature (1166)..(1166): n is a, c, g, or t
  misc_feature (1172)..(1172): n is a, c, g, or t
  misc_feature (1192)..(1192): n is a, c, g, or t
attagagaaattactatgagaggatcgcatcaccatcaccatcacggatcctatttaggtgacactatagaatcgtcgacccacgcgtccgatttggaacattatctggacagtattgaaaaccttccctttgaattacagagaaactttcagctcatgagggacctagaccaaagaacagaggacctgaaggctgaaattgacaagttggccactgagtatatgagtagtgcccgcagcctgagctccgaggaaaaattggcccttctcaaacagatccaggaagcctatggcaagtgcaaggaatttggtgacgacaaggtgcagcttgccatgcagacctatgagatggtggacaaacacattcggcggctggacacagacctggcccgttttgaggctgatctcaaggagaaacagattgagtcaagtgactatgacagctcttccagcaaaggcaaaaagaaaggccggactcaaaaggagaagaaagctgctcgtgctcgttccaaagggaaaaactcggatgaagaagcccccaagactgcccagaagaagttaaagctcgtgcgcacaagtcctgagtatgggatgccctcagtgacctttggcagtgtccacccctctgatgtgttggatatgcctgtggatcccaacgaacccacctattgcctttgtcaccaggtctcctatggagagatgattggctgtgacaaccctgattgttccattgagtggttccattttgcctgtgtggggctgacaaccaagcctcgggggaaatggttttgcccacgctgctcccaagaacggaagaagaaatagataagggccttggattccaacacagtttcttccacatcccctgacttgggctagtgggcanaggaatgcctgtgcccaagaggatccntcctggganagggggccaaggtggaatgcaaatactcccatgtaaaaggaacttgggntaggtaaaataaaancttatacntgtttnnnaaaannnnnnnnnnnnnnaggggcggccncnccccnaagngagncnnattaagctttantnacctgaacttggacccctgttgaaaaaacccnnaatgnccccccaaacnccctnnggnattttttcnaaaccccccggttgcccccggggnnttttttttggnggaaancccaacctacttggcgaaantt

SEQ ID NO: 243 - DNA, 1405 bp, Homo Sapiens
  misc_feature (770)..(770): n is a, c, g, or t
  misc_feature (805)..(805): n is a, c, g, or t
  misc_feature (823)..(823): n is a, c, g, or t
  misc_feature (848)..(848): n is a, c, g, or t
  misc_feature (851)..(851): n is a, c, g, or t
  misc_feature (858)..(858): n is a, c, g, or t
  misc_feature (870)..(870): n is a, c, g, or t
  misc_feature (901)..(902): n is a, c, g, or t
  misc_feature (911)..(911): n is a, c, g, or t
  misc_feature (915)..(915): n is a, c, g, or t
  misc_feature (921)..(921): n is a, c, g, or t
  misc_feature (934)..(934): n is a, c, g, or t
  misc_feature (938)..(938): n is a, c, g, or t
  misc_feature (953)..(953): n is a, c, g, or t
  misc_feature (972)..(972): n is a, c, g, or t
  misc_feature (974)..(975): n is a, c, g, or t
  misc_feature (992)..(992): n is a, c, g, or t
  misc_feature (998)..(998): n is a, c, g, or t
  misc_feature (1001)..(1001): n is a, c, g, or t
  misc_feature (1006)..(1006): n is a, c, g, or t
  misc_feature (1014)..(1014): n is a, c, g, or t
  misc_feature (1028)..(1028): n is a, c, g, or t
  misc_feature (1031)..(1032): n is a, c, g, or t
  misc_feature (1034)..(1049): n is a, c, g, or t
  misc_feature (1051)..(1052): n is a, c, g, or t
  misc_feature (1060)..(1060): n is a, c, g, or t
  misc_feature (1065)..(1065): n is a, c, g, or t
  misc_feature (1069)..(1069): n is a, c, g, or t
  misc_feature (1074)..(1074): n is a, c, g, or t
  misc_feature (1077)..(1077): n is a, c, g, or t
  misc_feature (1085)..(1085): n is a, c, g, or t
  misc_feature (1089)..(1089): n is a, c, g, or t
  misc_feature (1099)..(1099): n is a, c, g, or t
  misc_feature (1106)..(1107): n is a, c, g, or t
  misc_feature (1111)..(1112): n is a, c, g, or t
  misc_feature (1116)..(1116): n is a, c, g, or t
  misc_feature (1119)..(1119): n is a, c, g, or t
  misc_feature (1123)..(1125): n is a, c, g, or t
  misc_feature (1128)..(1128): n is a, c, g, or t
  misc_feature (1131)..(1131): n is a, c, g, or t
  misc_feature (1134)..(1134): n is a, c, g, or t
  misc_feature (1144)..(1144): n is a, c, g, or t
  misc_feature (1151)..(1151): n is a, c, g, or t
  misc_feature (1158)..(1158): n is a, c, g, or t
  misc_feature (1162)..(1168): n is a, c, g, or t
  misc_feature (1172)..(1172): n is a, c, g, or t
  misc_feature (1177)..(1177): n is a, c, g, or t
  misc_feature (1180)..(1181): n is a, c, g, or t
  misc_feature (1194)..(1195): n is a, c, g, or t
  misc_feature (1197)..(1197): n is a, c, g, or t
  misc_feature (1201)..(1201): n is a, c, g, or t
  misc_feature (1203)..(1203): n is a, c, g, or t
  misc_feature (1205)..(1210): n is a, c, g, or t
  misc_feature (1216)..(1217): n is a, c, g, or t
  misc_feature (1221)..(1221): n is a, c, g, or t
  misc_feature (1226)..(1228): n is a, c, g, or t
  misc_feature (1230)..(1232): n is a, c, g, or t
  misc_feature (1234)..(1235): n is a, c, g, or t
  misc_feature (1238)..(1241): n is a, c, g, or t
  misc_feature (1244)..(1248): n is a, c, g, or t
  misc_feature (1250)..(1250): n is a, c, g, or t
  misc_feature (1256)..(1260): n is a, c, g, or t
  misc_feature (1262)..(1265): n is a, c, g, or t
  misc_feature (1267)..(1273): n is a, c, g, or t
  misc_feature (1278)..(1279): n is a, c, g, or t
  misc_feature (1281)..(1286): n is a, c, g, or t
  misc_feature (1288)..(1293): n is a, c, g, or t
  misc_feature (1304)..(1304): n is a, c, g, or t
  misc_feature (1307)..(1308): n is a, c, g, or t
  misc_feature (1311)..(1316): n is a, c, g, or t
  misc_feature (1318)..(1324): n is a, c, g, or t
  misc_feature (1326)..(1327): n is a, c, g, or t
  misc_feature (1329)..(1329): n is a, c, g, or t
  misc_feature (1332)..(1332): n is a, c, g, or t
  misc_feature (1336)..(1337): n is a, c, g, or t
  misc_feature (1339)..(1344): n is a, c, g, or t
  misc_feature (1346)..(1346): n is a, c, g, or t
  misc_feature (1348)..(1353): n is a, c, g, or t
  misc_feature (1358)..(1358): n is a, c, g, or t
  misc_feature (1360)..(1363): n is a, c, g, or t
  misc_feature (1366)..(1366): n is a, c, g, or t
  misc_feature (1372)..(1376): n is a, c, g, or t
  misc_feature (1381)..(1386): n is a, c, g, or t
  misc_feature (1392)..(1392): n is a, c, g, or t
  misc_feature (1398)..(1398): n is a, c, g, or t
  misc_feature (1400)..(1403): n is a, c, g, or t
tgagaaattactatgagaggatcgcatcaccatcaccatcacggatcctatttaggtgacactatagaatcgtcgacccacgcgtccgcaggggcgtgcagcccgcttgccaatcagagcgcggctgagcggccccgcagccaacccccgaggagcggccggctggcgtccgccgcgcccaggagttggggatgtcctacaaacccatcgcccctgctcccagcagcacccctggctccagcacccctgggccgggcaccccggtccctacaggaagcgtcccgtcgccgtcgggctcagtgccaggagccggcgctcctttcagaccgctgtttaacgactttggaccgccttccatgggctacgtgcaggcgatgaagccacccggcgcccagggctcccagagcacctacacggacctgctgtcagtcatagaggagatgggcaaagagatccggcctacctatgctggcagcaagagcgccatggagcgcctgaagagaggtatcatccatgcccgggccctagtcagagagtgcctggcagagacagagcggaacgcccgcacgtaacaggaagcgcctcggcctcagcgtctggacctatccggccactgcagagcacccgcttctccctggccttcatcccgagttgcactaaccatcctgggcttcctgtcctgtgtcccttggtgggtcccctccaggaaccaaggagtggccctccaggtggcagcactaaggacacccccccacaacaagagttagcancgaggtccccatgagtcccacccatgacctgcccnacagtgttgcccaccggnaacttttgtggcccctaccgctcanccnttcccancacttctcccanttttgtcccgaagcctccttcttcccccaannaaggggcanaggncttggnaacctccctggcnttgngtcctgaaacaaaangaactcttttatctggggngnnttttgcaaaaaatgccntttttntanttaanaaaaaaanattttgaaaaaaanaannannnnnnnnnnnnnnnngnngggccccnccctnaaanggaantcnaattaaancttnattaattgantttgganncctnntttnaantccnnnaanganccncaaaactccnttttganttttttnaaannnnnnntttnccccnggnntttttttttttgnngnaaancnannnnnntttggnnaaanttttnnnannnannaannnnaannnnnanaaaaannnnngnnnnannnnnnnttaanntnnnnnngnnnnnnaaaaaattttnagnnttnnnnnntnnnnnnnannanaanaaanntnnnnnnantnnnnnnttttnannnnaanaaaaannnnnttttnnnnnntttttntttttncnnnnaa

SEQ ID NO: 244 - DNA, 1307 bp, Homo Sapiens
  misc_feature (843)..(843): n is a, c, g, or t
  misc_feature (915)..(915): n is a, c, g, or t
  misc_feature (931)..(931): n is a, c, g, or t
  misc_feature (942)..(942): n is a, c, g, or t
  misc_feature (947)..(947): n is a, c, g, or t
  misc_feature (957)..(957): n is a, c, g, or t
  misc_feature (965)..(965): n is a, c, g, or t
  misc_feature (977)..(977): n is a, c, g, or t
  misc_feature (993)..(993): n is a, c, g, or t
  misc_feature (1001)..(1001): n is a, c, g, or t
  misc_feature (1009)..(1009): n is a, c, g, or t
  misc_feature (1020)..(1020): n is a, c, g, or t
  misc_feature (1041)..(1041): n is a, c, g, or t
  misc_feature (1054)..(1054): n is a, c, g, or t
  misc_feature (1061)..(1061): n is a, c, g, or t
  misc_feature (1064)..(1064): n is a, c, g, or t
  misc_feature (1066)..(1066): n is a, c, g, or t
  misc_feature (1071)..(1071): n is a, c, g, or t
  misc_feature (1073)..(1075): n is a, c, g, or t
  misc_feature (1085)..(1085): n is a, c, g, or t
  misc_feature (1089)..(1089): n is a, c, g, or t
  misc_feature (1094)..(1094): n is a, c, g, or t
  misc_feature (1096)..(1096): n is a, c, g, or t
  misc_feature (1102)..(1102): n is a, c, g, or t
  misc_feature (1105)..(1105): n is a, c, g, or t
  misc_feature (1111)..(1112): n is a, c, g, or t
  misc_feature (1123)..(1123): n is a, c, g, or t
  misc_feature (1137)..(1137): n is a, c, g, or t
  misc_feature (1140)..(1140): n is a, c, g, or t
  misc_feature (1143)..(1143): n is a, c, g, or t
  misc_feature (1145)..(1145): n is a, c, g, or t
  misc_feature (1148)..(1148): n is a, c, g, or t
  misc_feature (1153)..(1153): n is a, c, g, or t
  misc_feature (1155)..(1155): n is a, c, g, or t
  misc_feature (1157)..(1157): n is a, c, g, or t
  misc_feature (1161)..(1161): n is a, c, g, or t
  misc_feature (1172)..(1172): n is a, c, g, or t
  misc_feature (1174)..(1174): n is a, c, g, or t
  misc_feature (1178)..(1178): n is a, c, g, or t
  misc_feature (1190)..(1191): n is a, c, g, or t
  misc_feature (1194)..(1194): n is a, c, g, or t
  misc_feature (1196)..(1196): n is a, c, g, or t
  misc_feature (1199)..(1199): n is a, c, g, or t
  misc_feature (1205)..(1208): n is a, c, g, or t
  misc_feature (1210)..(1210): n is a, c, g, or t
  misc_feature (1214)..(1216): n is a, c, g, or t
  misc_feature (1218)..(1218): n is a, c, g, or t
  misc_feature (1221)..(1223): n is a, c, g, or t
  misc_feature (1225)..(1228): n is a, c, g, or t
  misc_feature (1230)..(1231): n is a, c, g, or t
  misc_feature (1234)..(1234): n is a, c, g, or t
  misc_feature (1237)..(1239): n is a, c, g, or t
  misc_feature (1242)..(1242): n is a, c, g, or t
  misc_feature (1244)..(1244): n is a, c, g, or t
  misc_feature (1247)..(1247): n is a, c, g, or t
  misc_feature (1251)..(1251): n is a, c, g, or t
  misc_feature (1253)..(1253): n is a, c, g, or t
  misc_feature (1255)..(1255): n is a, c, g, or t
  misc_feature (1260)..(1261): n is a, c, g, or t
  misc_feature (1263)..(1263): n is a, c, g, or t
  misc_feature (1266)..(1272): n is a, c, g, or t
  misc_feature (1276)..(1281): n is a, c, g, or t
  misc_feature (1283)..(1285): n is a, c, g, or t
  misc_feature (1291)..(1291): n is a, c, g, or t
  misc_feature (1294)..(1294): n is a, c, g, or t
  misc_feature (1296)..(1296): n is a, c, g, or t
  misc_feature (1298)..(1298): n is a, c, g, or t
  misc_feature (1303)..(1303): n is a, c, g, or t
  misc_feature (1305)..(1305): n is a, c, g, or t
  misc_feature (1307)..(1307): n is a, c, g, or t
tagagaaattactatgagaggatcgcatcaccatcaccatcacggatcctatttaggtgacactatagaatcgtcgacccacgcgtccgggaaacgcaagtgcctgcgagagggcttcatcactgaggactgggaccagcccgtggccgactggaagatcttctacttcttacggagcctgcacaggaacctcctgcacaacccgtgcgctgaagaggggttcgagttctggagcctggatgtgaatggaggcgatgagtggaaggtggaggatctctctcgagaccagaggaaggaattccccaatgaccaggtcaagaaatacttcgttacttcatattagtaagatccggggacttggggtaggggaaagcccaaatcaatttaccctggggtctctcccaccctggaaggggcagtcctagcccctcactgccctagtggtgagcccagcccctcccacccctctgcctgcccccagcacctgcctcaagtcccaggtggtggacctcaaggccgaagggtattgggaggagctgatggataccacacggccggacatcgaggtcaaggactggttcgcagccaggccagattgcgggtccaagtaccagctgtgcgttcagctcctgtcgtccgcgcacgcgcctctggggaccttccagccagacccggcgaccatccagcagaagagcgatgccaagtggagggaggtctcccacacattctccaactacccgcccggcgtccgctacatctggtttcagcacggcggcgtggacactcattactgggccggctggtacggcccgagggtcaccaacagcagcatcaccatcgggnccccgctgccctgacaccccctgagcccccatctgctgaaccctgactggtaaacaactgctgtcaaaaaanggctgggcttgggaangggaagtggangccangtgtccccanacctctanccttgcccctancacctctttttgtgancctctcangggggcanccctcccatgntggggtcgggccactctcccnaaagtcttgactnatgatgnccngnaaccngnnnggccctttcnaaangaacncngaaatnggnagggcnntgttccctggnccctcaaaatcaantgnagncnccngattntncncctncccccgggacntnaccntttttttacccnnaangnagnaaaaannnnantttnnntnccnnngnnnngnnggnggnnnttntnaanttgnangnggggnntnggnnnnnnncccnnnnnncnnntttttnccncncnaaaangntn

SEQ ID NO: 245 - DNA, 1307 bp, Homo Sapiens
  misc_feature (3)..(3): n is a, c, g, or t
  misc_feature (15)..(15): n is a, c, g, or t
  misc_feature (858)..(858): n is a, c, g, or t
  misc_feature (880)..(880): n is a, c, g, or t
  misc_feature (901)..(901): n is a, c, g, or t
  misc_feature (922)..(922): n is a, c, g, or t
  misc_feature (931)..(931): n is a, c, g, or t
  misc_feature (948)..(948): n is a, c, g, or t
  misc_feature (974)..(974): n is a, c, g, or t
  misc_feature (979)..(979): n is a, c, g, or t
  misc_feature (995)..(995): n is a, c, g, or t
  misc_feature (1003)..(1003): n is a, c, g, or t
  misc_feature (1009)..(1009): n is a, c, g, or t
  misc_feature (1020)..(1020): n is a, c, g, or t
  misc_feature (1030)..(1030): n is a, c, g, or t
  misc_feature (1036)..(1036): n is a, c, g, or t
  misc_feature (1047)..(1047): n is a, c, g, or t
  misc_feature (1052)..(1053): n is a, c, g, or t
  misc_feature (1056)..(1057): n is a, c, g, or t
  misc_feature (1060)..(1060): n is a, c, g, or t
  misc_feature (1082)..(1083): n is a, c, g, or t
  misc_feature (1096)..(1096): n is a, c, g, or t
  misc_feature (1100)..(1100): n is a, c, g, or t
  misc_feature (1103)..(1103): n is a, c, g, or t
  misc_feature (1108)..(1108): n is a, c, g, or t
  misc_feature (1110)..(1110): n is a, c, g, or t
  misc_feature (1122)..(1122): n is a, c, g, or t
  misc_feature (1128)..(1128): n is a, c, g, or t
  misc_feature (1138)..(1139): n is a, c, g, or t
  misc_feature (1142)..(1142): n is a, c, g, or t
  misc_feature (1145)..(1145): n is a, c, g, or t
  misc_feature (1149)..(1149): n is a, c, g, or t
  misc_feature (1153)..(1153): n is a, c, g, or t
  misc_feature (1160)..(1160): n is a, c, g, or t
  misc_feature (1167)..(1167): n is a, c, g, or t
  misc_feature (1169)..(1169): n is a, c, g, or t
  misc_feature (1175)..(1175): n is a, c, g, or t
  misc_feature (1182)..(1182): n is a, c, g, or t
  misc_feature (1185)..(1185): n is a, c, g, or t
  misc_feature (1194)..(1194): n is a, c, g, or t
  misc_feature (1198)..(1198): n is a, c, g, or t
  misc_feature (1204)..(1205): n is a, c, g, or t
  misc_feature (1209)..(1209): n is a, c, g, or t
  misc_feature (1214)..(1214): n is a, c, g, or t
  misc_feature (1216)..(1217): n is a, c, g, or t
  misc_feature (1222)..(1222): n is a, c, g, or t
  misc_feature (1231)..(1231): n is a, c, g, or t
  misc_feature (1244)..(1245): n is a, c, g, or t
  misc_feature (1250)..(1250): n is a, c, g, or t
  misc_feature (1255)..(1257): n is a, c, g, or t
  misc_feature (1261)..(1262): n is a, c, g, or t
  misc_feature (1273)..(1274): n is a, c, g, or t
  misc_feature (1279)..(1280): n is a, c, g, or t
  misc_feature (1282)..(1283): n is a, c, g, or t
  misc_feature (1286)..(1286): n is a, c, g, or t
  misc_feature (1292)..(1292): n is a, c, g, or t
  misc_feature (1298)..(1299): n is a, c, g, or t
  misc_feature (1304)..(1305): n is a, c, g, or t
  misc_feature (1307)..(1307): n is a, c, g, or t
atngagaaattactntgagaggatcgcatcaccatcaccatcacggatcctatttaggtgacactatagaatcgtcgacccacgcgatccgagcccgaacgccccatgaagttcctccgggagcacttcgagaagctggagaaggaagaaaacaggcagattttggcgcggcaaaagtcaaactcacagtcggactcccatgatgaggaggtgtcgcccacccccccgaaccctgtggtgaaggcccgccgccggcgaggaggcgtgagtgccgaggtgtacaccgaggaggacgccgtgtcctacgtcaggaaggtgattcccaaggactacaaaaccatgactgcgctggccaaggccatctccaagaacgtgctcttcgctcacctggatgacaacgagaggagtgacatattcgatgccatgttccctgtcactcacatcgctggggagactgttatacagcaagggaatgaaggagacaacttctatgtcgttgatcaaggggaagtggatgtgtacgtgaacggagagtgggtgaccaacatcagcgagggaggcagcttcggggagctggcgctcatctacggcacccccagggctgcgaccgtgaaagccaagacggacctcaagctctgggggatcgaccgggacagctaccggcgcatccttatgggcagcacgctgaggaaacgcaagatgtacgaggagttcctcagcaaggtctccatcctagagtccctggagaagtgggagcgtctgaccgtggcggatgcgctggagcccgtccagtttgaagatggagagaaaattgtggtccagggagagcctggggacgacttttacatcatcacgganggcaccgcgttccgtgctgcancgccggtcccccaatgaggantacgtggaaggtggggcgccntgggaaccntctgactactttcgggnaaattgcactgctgcttgaaaccggnccccngggcggcccactgtcnttggcccngggggnccccctcaagntgtgtgaaancttganccgggcccccnccttnnaannggngtgcttggggcccttgcttctnnaaattctccaaanaggnaanatttnanggtttaaaaaantttttnttttccttcnncgnttngaanaaantttcccnccctggnanccccantttcccnagnggggggggnccgngccctnncctnttgtntnnggggnccccggaanccccttttttaannttggncccgnnngggnntgggttccccnnacccnnannaanttcccnttcccnnaattnntn

SEQ ID NO: 246 - DNA, 974 bp, Homo Sapiens
gattactatgagaggtcgcatcaccatcaccatcacggatcctatttaggtgacactatagaatcgtcgacccacgcgtccgcaggcgccgccgggacgggcacgggcgcgcgggctccggcgggcgccggctgccttcctccgtcgctcgctgtctctcccggccgcattctcctccgctgcggggccgagctctccccagcgctcgcaggaaggaagaagggagccgaggacgccgagaagttcccgcggcagccgcggatcccggccaaggcggaggctgcggctccgacggggcaggagcgcgatccacggcgaggggcgtacggccaaagggtccgcggcgtggagcgctcggaccttccgctctcccccgggcgtgggccgggaccccatgagacgcgcccacgaggggcgcgagattcctagcttgggcggcgctaggcggagggaggtgttgcagccgccggagccagagagctgccggcaggaggcggcggcggcaagaacttgaacttggcgtcgggagcgggcgccccggacgccccccgccggggccggggcgccgagggacctgcgccgcagcgctgccccccgaatggccgcggcggcggaccgggctcccgcgccgcggccctaggcggcctctcgccatggccaagtggctaaacaagtacttcagcttgggcaacagcaagaccaagagccccccgcagccgccgcggccagactaccgcgagcagcggcgccgaggcgagcggccctcgcagcccccccaggccgtgccgcaggcctcctccgccgcctcggcgtcctgcggtccggccaccgcctcctgcttctcagcctcttcgggctcgctgcccgacgacagcggcagcaccagcgacctcatccgcgcctaccgcgcgcagaaaggagcgagacttcgaggacccctacaacgggcctggctcgtcgctgcgcaactgcgc

SEQ ID NO: 247 - DNA, 1229 bp, Homo Sapiens
  misc_feature (101)..(101): n is a, c, g, or t
  misc_feature (139)..(139): n is a, c, g, or t
  misc_feature (144)..(144): n is a, c, g, or t
  misc_feature (167)..(167): n is a, c, g, or t
  misc_feature (180)..(180): n is a, c, g, or t
  misc_feature (223)..(223): n is a, c, g, or t
  misc_feature (481)..(481): n is a, c, g, or t
  misc_feature (486)..(486): n is a, c, g, or t
  misc_feature (501)..(501): n is a, c, g, or t
  misc_feature (521)..(521): n is a, c, g, or t
  misc_feature (670)..(670): n is a, c, g, or t
  misc_feature (778)..(778): n is a, c, g, or t
  misc_feature (866)..(866): n is a, c, g, or t
  misc_feature (889)..(889): n is a, c, g, or t
  misc_feature (941)..(949): n is a, c, g, or t
  misc_feature (952)..(957): n is a, c, g, or t
  misc_feature (959)..(967): n is a, c, g, or t
  misc_feature (969)..(969): n is a, c, g, or t
  misc_feature (971)..(1017): n is a, c, g, or t
  misc_feature (1020)..(1035): n is a, c, g, or t
  misc_feature (1041)..(1041): n is a, c, g, or t
  misc_feature (1049)..(1049): n is a, c, g, or t
  misc_feature (1054)..(1055): n is a, c, g, or t
  misc_feature (1059)..(1065): n is a, c, g, or t
  misc_feature (1068)..(1070): n is a, c, g, or t
  misc_feature (1072)..(1072): n is a, c, g, or t
  misc_feature (1075)..(1075): n is a, c, g, or t
  misc_feature (1078)..(1081): n is a, c, g, or t
  misc_feature (1083)..(1086): n is a, c, g, or t
  misc_feature (1088)..(1089): n is a, c, g, or t
  misc_feature (1093)..(1098): n is a, c, g, or t
  misc_feature (1103)..(1104): n is a, c, g, or t
  misc_feature (1106)..(1108): n is a, c, g, or t
  misc_feature (1111)..(1111): n is a, c, g, or t
  misc_feature (1114)..(1114): n is a, c, g, or t
  misc_feature (1124)..(1125): n is a, c, g, or t
  misc_feature (1128)..(1130): n is a, c, g, or t
  misc_feature (1133)..(1133): n is a, c, g, or t
  misc_feature (1140)..(1140): n is a, c, g, or t
  misc_feature (1146)..(1146): n is a, c, g, or t
  misc_feature (1148)..(1150): n is a, c, g, or t
  misc_feature (1154)..(1154): n is a, c, g, or t
  misc_feature (1156)..(1157): n is a, c, g, or t
  misc_feature (1160)..(1161): n is a, c, g, or t
  misc_feature (1164)..(1165): n is a, c, g, or t
  misc_feature (1174)..(1175): n is a, c, g, or t
  misc_feature (1179)..(1180): n is a, c, g, or t
  misc_feature (1184)..(1185): n is a, c, g, or t
  misc_feature (1188)..(1194): n is a, c, g, or t
  misc_feature (1196)..(1196): n is a, c, g, or t
  misc_feature (1200)..(1200): n is a, c, g, or t
  misc_feature (1203)..(1203): n is a, c, g, or t
  misc_feature (1209)..(1229): n is a, c, g, or t
agaaattactatgagaggatcgcatcaccatcaccatcacggatcctatttaggtgacactatagaatcgtcgacccacgcgtccgcacacacgtgggganaagccgtatgtttgtggggtgtgtgggcgaggctttantctcnagtcacacctcaacagacaccanaacatacactcangagagaagcccattgtgtgcaaggactgtggccggggcttcanccagcaatccaacctcatcagacaccagaggacgcactcaggcgagaagcccatggtgtgtggggagtgcgggcgaggcttcagccagaagtcaaaccttgttgcacaccaaaggacgcactcaggggagaggccgtatgtgtgccgagagtgcgggcgaggctttagccaccaggccggtctcatcaggcacaagcggaagcactcgagggagaagccctacatgtgcaggcagtgtggactgggctttggcaatangtcanctctaattacacacnagcgggctcactcggaaganaagccttgtgtgtgcagagagtgtggccaaggctttctccaaaagtcacacctcaccttacatcaaatgacacatacgggggagaagccatatgtgtgcaagacgtgtgggcggggcttcagcctcaagtctcacctcagcagacacangaagaccacgtctgtccaccacagactgccagtgcagcccgaccctgagccgtgtgcagggcaaccttcggattccttatactctctctgaaggcaaagatggggacnaggactaagagtcagaatgttgacactttgatgaaatggagtaaagaaatgcattctgtaagtggtcaaaggacatttgactgtttantttctccacactaagtcttctcnatggttttgtggccttcggttgtaataaacttggcttctttatacatctgtnnnnnnnnnaannnnnntnnnnnnnnncntnnnnnnnnnnnnnnnnnnnnnnnnnnnnnnnnnnnnnnnnnnnnnnnaannnnnnnnnnnnnnnngggggncccccccnttaanngggnnnnnnnaannntnaanttnnnnannnngnncccnnnnnnaaaanncnnnaanggncccccaaaannccnnnggnatttttnaaaaancnnnggtngnnccnnggnnttttttttnngggnnaaannccnnnnnnntngggnaantttttnnnnnnnnnnnnnnnnnnnnn

SEQ ID NO: 248 - DNA, 902 bp, Homo Sapiens
ttaactatgagaggtcgcatcaccatcaccatcacggatcctatttaggtgacactatagaatcgtcgacccacgcgtccgctgctgctgacggggcccgggctggaggagcgagtgcgggcggcgggtgggcagctgccgccgcggcttttcaccctgccgctgctgcactacttggaagtgagcggctgcgggagcttgcgcgcgccggggcctggcctggcgcagggcctgccgcagctgcacagcctcgtgctgcggcgcaacgcgctggggcccggcctgagccccgagctcgggccgctgcctgcccttcgggtgctcgacctgtcgggcaacgcgctggaggcgctgccgccgggccaaggcctgggccccgccgagccgccgggccttccgcagctgcagagcctcaacctcagcggcaaccggctgcgcgagctgccagccgacctggcgcgctgcgccccgcgcctgcagagcctcaacctcaccggcaattgcctagactcctttcccgccgagctctttcgccccggcgcgctgcccctgctcagtgaactggcggctgctgacaactgcctccgagaactcagccccgacatcgcccacctggcctcgctcaagacgttggacctctcgaacaaccagctgagcgagatccctgcagagcttgcggactgccccaagctcaaggagatcaatttccgtgggaacaagctgagggacaagcgcctggagaagatggtcagcggctgccagaccagatccatcctggagtacctgcgcgtcggaggccgtggtggcgggaagggcaagggccgtgccgagggctcggagaaggaagagagccggaggaagaggagggagaggaagcagaggcgggaaggtgggtgatgggg

SEQ ID NO: 249 - DNA, 1364 bp, Homo Sapiens
  misc_feature (86)..(86): n is a, c, g, or t
  misc_feature (750)..(750): n is a, c, g, or t
  misc_feature (819)..(819): n is a, c, g, or t
  misc_feature (849)..(849): n is a, c, g, or t
  misc_feature (855)..(855): n is a, c, g, or t
  misc_feature (871)..(871): n is a, c, g, or t
  misc_feature (901)..(901): n is a, c, g, or t
  misc_feature (903)..(903): n is a, c, g, or t
  misc_feature (930)..(930): n is a, c, g, or t
  misc_feature (940)..(940): n is a, c, g, or t
  misc_feature (945)..(945): n is a, c, g, or t
  misc_feature (953)..(953): n is a, c, g, or t
  misc_feature (957)..(957): n is a, c, g, or t
  misc_feature (970)..(970): n is a, c, g, or t
  misc_feature (979)..(979): n is a, c, g, or t
  misc_feature (989)..(989): n is a, c, g, or t
  misc_feature (1001)..(1001): n is a, c, g, or t
  misc_feature (1003)..(1003): n is a, c, g, or t
  misc_feature (1015)..(1015): n is a, c, g, or t
  misc_feature (1029)..(1029): n is a, c, g, or t
  misc_feature (1031)..(1031): n is a, c, g, or t
  misc_feature (1057)..(1057): n is a, c, g, or t
  misc_feature (1065)..(1065): n is a, c, g, or t
  misc_feature (1072)..(1072): n is a, c, g, or t
  misc_feature (1085)..(1085): n is a, c, g, or t
  misc_feature (1125)..(1127): n is a, c, g, or t
  misc_feature (1131)..(1131): n is a, c, g, or t
  misc_feature (1134)..(1134): n is a, c, g, or t
  misc_feature (1136)..(1136): n is a, c, g, or t
  misc_feature (1142)..(1142): n is a, c, g, or t
  misc_feature (1145)..(1145): n is a, c, g, or t
  misc_feature (1147)..(1147): n is a, c, g, or t
  misc_feature (1149)..(1149): n is a, c, g, or t
  misc_feature (1160)..(1160): n is a, c, g, or t
  misc_feature (1165)..(1165): n is a, c, g, or t
  misc_feature (1168)..(1170): n is a, c, g, or t
  misc_feature (1172)..(1172): n is a, c, g, or t
  misc_feature (1181)..(1181): n is a, c, g, or t
  misc_feature (1198)..(1199): n is a, c, g, or t
  misc_feature (1202)..(1202): n is a, c, g, or t
  misc_feature (1211)..(1211): n is a, c, g, or t
  misc_feature (1218)..(1218): n is a, c, g, or t
  misc_feature (1222)..(1222): n is a, c, g, or t
  misc_feature (1225)..(1225): n is a, c, g, or t
  misc_feature (1228)..(1234): n is a, c, g, or t
  misc_feature (1238)..(1238): n is a, c, g, or t
  misc_feature (1240)..(1240): n is a, c, g, or t
  misc_feature (1249)..(1251): n is a, c, g, or t
  misc_feature (1254)..(1254): n is a, c, g, or t
  misc_feature (1257)..(1257): n is a, c, g, or t
  misc_feature (1259)..(1259): n is a, c, g, or t
  misc_feature (1266)..(1267): n is a, c, g, or t
  misc_feature (1270)..(1270): n is a, c, g, or t
  misc_feature (1273)..(1273): n is a, c, g, or t
  misc_feature (1277)..(1278): n is a, c, g, or t
  misc_feature (1286)..(1286): n is a, c, g, or t
  misc_feature (1297)..(1297): n is a, c, g, or t
  misc_feature (1303)..(1304): n is a, c, g, or t
  misc_feature (1306)..(1306): n is a, c, g, or t
  misc_feature (1314)..(1314): n is a, c, g, or t
  misc_feature (1318)..(1319): n is a, c, g, or t
  misc_feature (1336)..(1336): n is a, c, g, or t
  misc_feature (1340)..(1340): n is a, c, g, or t
  misc_feature (1343)..(1343): n is a, c, g, or t
  misc_feature (1350)..(1350): n is a, c, g, or t
  misc_feature (1352)..(1352): n is a, c, g, or t
tagagaaattactatgagaggatcgcatcaccatcaccatcacggatcctatttaggtgacactatagaatcgtcgacccacgcgntccggccatggccgcgccggccccgggcctcatctcggtgttctcgagttcccaggagctgggtgcggcgctagcgcagctggtggcccagcgcgcagcatgctgcctggcaggggcccgcgcccgtttcgcgctcggcttgtcgggcgggagcctcgtctcgatgctagcccgcgagctacccgccgccgtcgcccctgccgggccagctagcttagcgcgctggacgctgggcttctgcgacgagcgcctcgtgcccttcgatcacgccgagagcacgtacggcctctaccggacgcatcttctctccagactgccgatcccagaaagccaggtgatcaccattaaccccgagctgcctgtggaggaggcggctgaggactacgccaagaagctgagacaggcattccaaggggactccatcccggttttcgacctgctgatcctgggggtgggccccgatggtcacacctgctcactcttcccagaccaccccctcctacaggagcgggagaagattgtggctcccatcagtgactccccgaagccaccgccacagcgtgtgaccctcacgctacctgtcctgaatgcagcacgaactgtcatctttgtggcaactggagaaggcaaggcagctgttctgaagcgcattttggaggaccangaggaaaacccgctgcccgccgccctggtccagccccacaccgggaaaactgtgctggttcttggaacnaagcggcccgctcccttatagtgagtcgtnattaancttaaattagcctgancttggactcctgttgataaaatccagtaantnaccctcaaaaactccatctggaatttntttaaaaaangctcnggttgccncccngggcttttttttnttggtgaanaaattccaancttaacctttgncnaaaatttttcanggaacctaaagaantntaaaattggaaaaaaaaaaatcactngaaaatanccaccgnttaaaaaatcccnaatggaatcctaaaaaaaaattttttaaaggcattttcannncaanttntncaattntancntnaaaaccaaaancgttnaannngnaaatttaangcccttttttaaaaaanntanaaaaaaaanaaaccanaatnttnatnnnnnnnttantnaaaattttnnnccnccnanaaatgcnntcnccnaaannttttaagnaaaaaaaaaangtaacnngnaaaatganaaanntttcccctttttaaccntttntanaaaaaantnaaaatttttttc

SEQ ID NO: 250 - DNA, 1323 bp, Homo Sapiens
  misc_feature (1)..(1): n is a, c, g, or t
  misc_feature (3)..(3): n is a, c, g, or t
  misc_feature (806)..(806): n is a, c, g, or t
  misc_feature (899)..(899): n is a, c, g, or t
  misc_feature (903)..(903): n is a, c, g, or t
  misc_feature (909)..(909): n is a, c, g, or t
  misc_feature (963)..(963): n is a, c, g, or t
  misc_feature (969)..(969): n is a, c, g, or t
  misc_feature (976)..(976): n is a, c, g, or t
  misc_feature (990)..(990): n is a, c, g, or t
  misc_feature (992)..(992): n is a, c, g, or t
  misc_feature (994)..(994): n is a, c, g, or t
  misc_feature (998)..(998): n is a, c, g, or t
  misc_feature (1010)..(1010): n is a, c, g, or t
  misc_feature (1013)..(1014): n is a, c, g, or t
  misc_feature (1026)..(1026): n is a, c, g, or t
  misc_feature (1029)..(1029): n is a, c, g, or t
  misc_feature (1037)..(1037): n is a, c, g, or t
  misc_feature (1042)..(1042): n is a, c, g, or t
  misc_feature (1045)..(1045): n is a, c, g, or t
  misc_feature (1085)..(1085): n is a, c, g, or t
  misc_feature (1087)..(1087): n is a, c, g, or t
  misc_feature (1092)..(1092): n is a, c, g, or t
  misc_feature (1094)..(1094): n is a, c, g, or t
  misc_feature (1099)..(1099): n is a, c, g, or t
  misc_feature (1102)..(1102): n is a, c, g, or t
  misc_feature (1112)..(1113): n is a, c, g, or t
  misc_feature (1116)..(1116): n is a, c, g, or t
  misc_feature (1122)..(1122): n is a, c, g, or t
  misc_feature (1138)..(1138): n is a, c, g, or t
  misc_feature (1140)..(1140): n is a, c, g, or t
  misc_feature (1144)..(1145): n is a, c, g, or t
  misc_feature (1153)..(1153): n is a, c, g, or t
  misc_feature (1155)..(1155): n is a, c, g, or t
  misc_feature (1158)..(1160): n is a, c, g, or t
  misc_feature (1162)..(1162): n is a, c, g, or t
  misc_feature (1165)..(1166): n is a, c, g, or t
  misc_feature (1169)..(1169): n is a, c, g, or t
  misc_feature (1182)..(1182): n is a, c, g, or t
  misc_feature (1184)..(1184): n is a, c, g, or t
  misc_feature (1206)..(1206): n is a, c, g, or t
  misc_feature (1214)..(1214): n is a, c, g, or t
  misc_feature (1221)..(1222): n is a, c, g, or t
  misc_feature (1229)..(1229): n is a, c, g, or t
  misc_feature (1237)..(1237): n is a, c, g, or t
  misc_feature (1244)..(1244): n is a, c, g, or t
  misc_feature (1248)..(1248): n is a, c, g, or t
  misc_feature (1253)..(1254): n is a, c, g, or t
  misc_feature (1256)..(1257): n is a, c, g, or t
  misc_feature (1264)..(1265): n is a, c, g, or t
  misc_feature (1267)..(1267): n is a, c, g, or t
  misc_feature (1271)..(1271): n is a, c, g, or t
  misc_feature (1274)..(1274): n is a, c, g, or t
  misc_feature (1279)..(1280): n is a, c, g, or t
  misc_feature (1282)..(1282): n is a, c, g, or t
  misc_feature (1290)..(1290): n is a, c, g, or t
  misc_feature (1297)..(1297): n is a, c, g, or t
  misc_feature (1316)..(1316): n is a, c, g, or t
  misc_feature (1318)..(1318): n is a, c, g, or t
  misc_feature (1322)..(1323): n is a, c, g, or t
ntnagagaaattactatgagaggatcgcatcaccatcaccatcacggatcctatttaggtgacactatagaatcgtcgacccacgcgtccgccgacatggaagtcatcgagctgaacaaatgcacctcgggccaatcctttgaagtcatcctgaagccaccctcctttgatggggttcccgagttcaacgcctccctgccaaggcggcgagacccatccctggaagagatccagaagaaactagaagcggctgaggagcgaaggaagtaccaggaagcggagctcctgaaacacctagcagagaaacgggaacatgagagagaggtgatccaaaaggccattgaggaaaacaacaacttcatcaagatggctaaggaaaaactggcccagaagatggaatccaacaaggagaacagggaggcccacctcgccgccatgttggaacggctgcaagagaaggacaagcacgccgaggaggtgcggaaaaacaaggagctgaaggaagaggcctccaggtaaagcctagaggccaaagaactttccaggtcagccggacagctccagcagctccacgttccaggcagcctcgcccgccggctgcgctcccagcactggggtttggggggaggggggtggccaaggggcgtttcctctgcttttggtgtttgtacatgttaagaattgaccagtgaagccatcctatttgtttccggggaacaatgacggggtgggagaggggagaggagagagtttgggaaagggagatggagaagaactcaaggacattgcaaccctgcccggcgcanatctgattttcacatctctacctggacattgagcctccaggcaccatgttgaggagaaatgaaaaccagggcggtagaacttcagggtgaagnacanaattcntgggtggggcacggctgcaggcgcaccaaaaaacccagccaaagggggtgtgantaccantggtgtngcttccccctgcancngntggnatgaggtctgtntgnngtgtgtgaaccntcnttttttgntctcntgncccatgaaactttgaaaaaaaaaaaaaaaaaggggggccncnccctntngtganccnattaaccttnnttnactganctggactcctgttganantccnntatgaccncnaannncnttnnganttttttaaaaccntngttgcccccgggtttttttttngggaaaanccacttnntttgggnaatttttngggcttnggancttanngnnaaaaaanncngggnttnccccnntnttttcccngggcccnaaaaattttgggtttttcntntttnn

SEQ ID NO: 251 - DNA, 1344 bp, Homo Sapiens
  misc_feature (1)..(1): n is a, c, g, or t
  misc_feature (843)..(843): n is a, c, g, or t
  misc_feature (869)..(869): n is a, c, g, or t
  misc_feature (878)..(878): n is a, c, g, or t
  misc_feature (884)..(884): n is a, c, g, or t
  misc_feature (914)..(914): n is a, c, g, or t
  misc_feature (930)..(930): n is a, c, g, or t
  misc_feature (950)..(950): n is a, c, g, or t
  misc_feature (969)..(969): n is a, c, g, or t
  misc_feature (975)..(975): n is a, c, g, or t
  misc_feature (986)..(986): n is a, c, g, or t
  misc_feature (999)..(999): n is a, c, g, or t
  misc_feature (1013)..(1013): n is a, c, g, or t
  misc_feature (1024)..(1024): n is a, c, g, or t
  misc_feature (1032)..(1032): n is a, c, g, or t
  misc_feature (1048)..(1048): n is a, c, g, or t
  misc_feature (1050)..(1050): n is a, c, g, or t
  misc_feature (1055)..(1055): n is a, c, g, or t
  misc_feature (1067)..(1067): n is a, c, g, or t
  misc_feature (1080)..(1080): n is a, c, g, or t
  misc_feature (1089)..(1089): n is a, c, g, or t
  misc_feature (1107)..(1107): n is a, c, g, or t
  misc_feature (1112)..(1112): n is a, c, g, or t
  misc_feature (1123)..(1123): n is a, c, g, or t
  misc_feature (1125)..(1125): n is a, c, g, or t
  misc_feature (1137)..(1137): n is a, c, g, or t
  misc_feature (1150)..(1150): n is a, c, g, or t
  misc_feature (1153)..(1153): n is a, c, g, or t
  misc_feature (1155)..(1155): n is a, c, g, or t
  misc_feature (1157)..(1157): n is a, c, g, or t
  misc_feature (1162)..(1162): n is a, c, g, or t
  misc_feature (1172)..(1172): n is a, c, g, or t
  misc_feature (1181)..(1182): n is a, c, g, or t
  misc_feature (1188)..(1188): n is a, c, g, or t
  misc_feature (1193)..(1193): n is a, c, g, or t
  misc_feature (1195)..(1196): n is a, c, g, or t
  misc_feature (1198)..(1198): n is a, c, g, or t
  misc_feature (1205)..(1205): n is a, c, g, or t
  misc_feature (1209)..(1209): n is a, c, g, or t
  misc_feature (1211)..(1211): n is a, c, g, or t
  misc_feature (1213)..(1213): n is a, c, g, or t
  misc_feature (1224)..(1224): n is a, c, g, or t
  misc_feature (1226)..(1226): n is a, c, g, or t
  misc_feature (1229)..(1229): n is a, c, g, or t
  misc_feature (1232)..(1232): n is a, c, g, or t
  misc_feature (1236)..(1236): n is a, c, g, or t
  misc_feature (1254)..(1254): n is a, c, g, or t
  misc_feature (1261)..(1262): n is a, c, g, or t
  misc_feature (1271)..(1271): n is a, c, g, or t
  misc_feature (1275)..(1275): n is a, c, g, or t
  misc_feature (1291)..(1291): n is a, c, g, or t
  misc_feature (1303)..(1304): n is a, c, g, or t
  misc_feature (1308)..(1309): n is a, c, g, or t
  misc_feature (1311)..(1312): n is a, c, g, or t
  misc_feature (1316)..(1317): n is a, c, g, or t
  misc_feature (1320)..(1320): n is a, c, g, or t
  misc_feature (1322)..(1322): n is a, c, g, or t
  misc_feature (1324)..(1324): n is a, c, g, or t
  misc_feature (1333)..(1333): n is a, c, g, or t
  misc_feature (1335)..(1335): n is a, c, g, or t
  misc_feature (1337)..(1337): n is a, c, g, or t
naattagagaaattactatgagaggatcgcatcaccatcaccatcacggatcctatttaggtgacactatagaatcgtcgacccacgcgtccggccgcgatgggaccggaggcggcgcgggcggcggcggcgcagacaaaggggccaaaccagtgctcctgccacctctctggctgccccctagagcctgcccatcccagcctgaccaatgtccacagccagggagcagccaatcttcagcacacgggcgcacgtgttccaaattgacccagccaccaagcgaaactggatcccagcgggcaagcacgcactcactgtctcctatttctacgatgccacccgcaatgtgtaccgcatcatcagcatcggaggcgccaaggccatcatcaacagcactgtcactcccaacatgaccttcaccaaaacttcccagaagttcgggcagtgggccgacagtcgcgccaacacagtctatggcctgggctttgcctctgaacagcatctgacacagtttgccgagaagttccaggaagtgaaggaagcagccaggctggccagggagaaatctcaggatggcggggagctcaccagtccagccctggggctcgcctcccaccaggtgcccccgagccctctcgtcagtgccaacggccccggcgaggaaaaactgttccgcagccagagcgctgatgcccccggccccacagagcgcgagcggctaaagaagatgttgtctgagggctccgtgggcgaggtacagtgggaggccgagtttttcgcactgcaggacagcaacaacaagctggcaggcgccctgcgagaggccaacgccgccgcagcccnagtggaggcagcagctggaggctcancgtgcaaangccgancggctgcggcagcgggtggctgaactggangctcaggcagcttcanaggtgacccccaccggtganaaggaaggggctgggccanggccantcgctggaaanctggaaactctgntgcaaccaaggacnagagattcaancctgaaantcaaatgggggccccncnagccntggagctgccancgtgaagaaatcnacaaaaggngcaggacctggaaaaccncatgnggaattgaacncnactgcgggcaanggaaccaacctgnaanangnccggncaaacggaancggcccggnntaagtnggccngnnanccaactnctgnantnaggtttttaantnaanaanttcnaaaggcttgcccccctgnttaaatnncccttaacngggntgtttttttaaaaatncccctggaaggnnccanncnngggnnaantngnccctttctngnanagagggg

SEQ ID NO: 252 - DNA, 1200 bp, Homo Sapiens
  misc_feature (865)..(865): n is a, c, g, or t
  misc_feature (924)..(924): n is a, c, g, or t
  misc_feature (935)..(935): n is a, c, g, or t
  misc_feature (942)..(942): n is a, c, g, or t
  misc_feature (947)..(948): n is a, c, g, or t
  misc_feature (960)..(960): n is a, c, g, or t
  misc_feature (967)..(967): n is a, c, g, or t
  misc_feature (975)..(975): n is a, c, g, or t
  misc_feature (978)..(978): n is a, c, g, or t
  misc_feature (985)..(985): n is a, c, g, or t
  misc_feature (988)..(988): n is a, c, g, or t
  misc_feature (1006)..(1006): n is a, c, g, or t
  misc_feature (1010)..(1010): n is a, c, g, or t
  misc_feature (1033)..(1033): n is a, c, g, or t
  misc_feature (1037)..(1037): n is a, c, g, or t
  misc_feature (1040)..(1040): n is a, c, g, or t
  misc_feature (1051)..(1051): n is a, c, g, or t
  misc_feature (1058)..(1058): n is a, c, g, or t
  misc_feature (1061)..(1061): n is a, c, g, or t
  misc_feature (1071)..(1071): n is a, c, g, or t
  misc_feature (1076)..(1076): n is a, c, g, or t
  misc_feature (1078)..(1078): n is a, c, g, or t
  misc_feature (1085)..(1085): n is a, c, g, or t
  misc_feature (1090)..(1090): n is a, c, g, or t
  misc_feature (1095)..(1095): n is a, c, g, or t
  misc_feature (1101)..(1101): n is a, c, g, or t
  misc_feature (1108)..(1108): n is a, c, g, or t
  misc_feature (1115)..(1115): n is a, c, g, or t
  misc_feature (1126)..(1126): n is a, c, g, or t
  misc_feature (1136)..(1136): n is a, c, g, or t
  misc_feature (1138)..(1138): n is a, c, g, or t
  misc_feature (1145)..(1146): n is a, c, g, or t
  misc_feature (1159)..(1159): n is a, c, g, or t
  misc_feature (1162)..(1162): n is a, c, g, or t
  misc_feature (1165)..(1165): n is a, c, g, or t
  misc_feature (1173)..(1173): n is a, c, g, or t
  misc_feature (1178)..(1178): n is a, c, g, or t
  misc_feature (1180)..(1180): n is a, c, g, or t
  misc_feature (1192)..(1192): n is a, c, g, or t
  misc_feature (1197)..(1197): n is a, c, g, or t
aatagagaaattaactatgagaggatcgcatcaccatcaccatcacggatcctatttaggtgacactatagaatcgtcgacccacgcgtccggttctaagagggacatggcctccaatgaaggcagtcgcatcagtgctgcctctgtggccagcactgccattgctgcggcccagtgggccatctcacaggcctcccaaggtggggagggtacctgggccacctccgaggagccgccggtcgactacagctactaccaacaggatgagggctatggcaacagccagggcacagagtcttccctctatgcccatggctacctcaagggcaccaagggccctggcatcactggaaccaaaggggatcccactggagcaggtcccgaggcctccctagagcctggggccgactctgtgtcgatgcaggctttctctcgcgcccagcctggtgctgctcctggcatctaccaacaatcagccgaggcgagcagtagccagggcactgctgccaacagccagtcgtataccatcatgtcacccgctgtgctcaaatctgagctccagagccctacccatcctagttctgctctcccaccggctaccagccccactgcccaggaatcctacagccagtaccctgttcccgacgtctctacctaccagtacgatgagacctccggctactactatgacccccagaccggcctctactatgaccccaactcccagtattactacaatgctcagagccagcagtacctgtactgggatggggagaggcggacctatgttcccgccctggagcagtcggccgacggacataaggagacaggggcaccctcgaaggagggcaaagagaagaagganaagcacaagaccaagacagctcaacagattgccaaggaaatggaacgctgggcccgcantctcaacaaanaaaaaanaaaannttcaaaaataancttccancctatcanctnccttgcnaanatgacaaaaggcgggaantcanccactgcaaatgctggctatgcnatcntcnaaaaaaaaggnacactanccnaaaaacaccnaccancntggattntcccnaaatnggccangaaaacnccccaanccctccccaangaatgggggnancctaaannggggaaattaaanttnaanaaaaacanaaacntnggggcccttaancgaanaaa

SEQ ID NO: 253 - DNA, 989 bp, Homo Sapiens
ttactatgagaggtcgcatcaccatcaccatcacggatcctatttaggtgacactatagaatcgtcgacccacgcgtccgcagctcggtgcagaagcccagcagccggcgtgccgccgcccggccactccagcgccttcttccccgccttgcgctcctgccccaactcgcgctgtcgtcggaccccggcccatccagcagcgctcggcgcccaccaggcggacgcccaggagaacccctgcctccgtcgcggctcctggagagctgatcgttcacctgccccggcccgcctgaggacgggggtgccttcatgcggcccccacactcctcaccccgccgccgccgccgtccccgagctccgcacagtgcgccccagccccagcagggcgcacaactttggaagtctcgcggcgctccgagaggcggcagagtccgcgccccagccccgggccgggccgggccagaaccgcagcgtctgggggaagccagagagtcggtaatcgcttcggggatgtaaggcgacagacataggacccccgagctcgcatcagcacccttcggctgcctcccggggtgggggcgggccccgcacacggtaagacctcttgctttcgctcaggctcaagattcaagatacagatattgatatgtatatatatatttaatttcctgtcatccttccaagttatcaggccaccgatgatttttgttctcccttcttgaagaataaatctctctttacccatcggctctccctactctctcccgccgcttagaaataaaacttggctgtattagggagctcggagcaagaaggcgcccaccgagagcgtctgaagcgcgagccaggcgcagttcgcgggacccgggccatgggccgctagcggtcctccagttcgggcccggcctccctgcggccccctccctatgtgagccgcagccaggcgagcggggcgccggaggaagaggaggacccacgggcgccgggtc

SEQ ID NO: 254 - DNA, 1198 bp, Homo Sapiens
  misc_feature (473)..(473): n is a, c, g, or t
  misc_feature (489)..(489): n is a, c, g, or t
  misc_feature (500)..(500): n is a, c, g, or t
  misc_feature (521)..(521): n is a, c, g, or t
  misc_feature (532)..(532): n is a, c, g, or t
  misc_feature (536)..(536): n is a, c, g, or t
  misc_feature (538)..(538): n is a, c, g, or t
  misc_feature (540)..(540): n is a, c, g, or t
  misc_feature (545)..(546): n is a, c, g, or t
  misc_feature (549)..(549): n is a, c, g, or t
  misc_feature (555)..(555): n is a, c, g, or t
  misc_feature (572)..(573): n is a, c, g, or t
  misc_feature (576)..(576): n is a, c, g, or t
  misc_feature (579)..(579): n is a, c, g, or t
  misc_feature (583)..(583): n is a, c, g, or t
  misc_feature (595)..(595): n is a, c, g, or t
  misc_feature (606)..(606): n is a, c, g, or t
  misc_feature (612)..(612): n is a, c, g, or t
  misc_feature (614)..(614): n is a, c, g, or t
  misc_feature (625)..(625): n is a, c, g, or t
  misc_feature (629)..(629): n is a, c, g, or t
  misc_feature (637)..(637): n is a, c, g, or t
  misc_feature (643)..(644): n is a, c, g, or t
  misc_feature (648)..(648): n is a, c, g, or t
  misc_feature (652)..(652): n is a, c, g, or t
  misc_feature (657)..(657): n is a, c, g, or t
  misc_feature (662)..(662): n is a, c, g, or t
  misc_feature (666)..(666): n is a, c, g, or t
  misc_feature (669)..(672): n is a, c, g, or t
  misc_feature (674)..(674): n is a, c, g, or t
  misc_feature (677)..(677): n is a, c, g, or t
  misc_feature (679)..(679): n is a, c, g, or t
  misc_feature (683)..(684): n is a, c, g, or t
  misc_feature (687)..(687): n is a, c, g, or t
  misc_feature (691)..(691): n is a, c, g, or t
  misc_feature (694)..(694): n is a, c, g, or t
  misc_feature (696)..(697): n is a, c, g, or t
  misc_feature (710)..(712): n is a, c, g, or t
  misc_feature (714)..(714): n is a, c, g, or t
  misc_feature (719)..(719): n is a, c, g, or t
  misc_feature (721)..(721): n is a, c, g, or t
  misc_feature (724)..(724): n is a, c, g, or t
  misc_feature (730)..(730): n is a, c, g, or t
  misc_feature (733)..(733): n is a, c, g, or t
  misc_feature (736)..(737): n is a, c, g, or t
  misc_feature (739)..(740): n is a, c, g, or t
  misc_feature (744)..(745): n is a, c, g, or t
  misc_feature (749)..(749): n is a, c, g, or t
  misc_feature (752)..(752): n is a, c, g, or t
  misc_feature (755)..(756): n is a, c, g, or t
  misc_feature (761)..(761): n is a, c, g, or t
  misc_feature (763)..(763): n is a, c, g, or t
  misc_feature (766)..(766): n is a, c, g, or t
  misc_feature (777)..(778): n is a, c, g, or t
  misc_feature (782)..(782): n is a, c, g, or t
  misc_feature (792)..(794): n is a, c, g, or t
  misc_feature (798)..(798): n is a, c, g, or t
  misc_feature (803)..(803): n is a, c, g, or t
  misc_feature (806)..(806): n is a, c, g, or t
  misc_feature (809)..(809): n is a, c, g, or t
  misc_feature (816)..(816): n is a, c, g, or t
  misc_feature (823)..(824): n is a, c, g, or t
  misc_feature (829)..(829): n is a, c, g, or t
  misc_feature (840)..(840): n is a, c, g, or t
  misc_feature (846)..(846): n is a, c, g, or t
  misc_feature (851)..(851): n is a, c, g, or t
  misc_feature (856)..(856): n is a, c, g, or t
  misc_feature (865)..(868): n is a, c, g, or t
  misc_feature (871)..(872): n is a, c, g, or t
  misc_feature (885)..(887): n is a, c, g, or t
  misc_feature (890)..(890): n is a, c, g, or t
  misc_feature (892)..(892): n is a, c, g, or t
  misc_feature (894)..(894): n is a, c, g, or t
  misc_feature (898)..(898): n is a, c, g, or t
  misc_feature (900)..(900): n is a, c, g, or t
  misc_feature (906)..(906): n is a, c, g, or t
  misc_feature (921)..(922): n is a, c, g, or t
  misc_feature (929)..(929): n is a, c, g, or t
  misc_feature (935)..(935): n is a, c, g, or t
  misc_feature (939)..(940): n is a, c, g, or t
  misc_feature (943)..(943): n is a, c, g, or t
  misc_feature (946)..(947): n is a, c, g, or t
  misc_feature (958)..(958): n is a, c, g, or t
  misc_feature (964)..(965): n is a, c, g, or t
  misc_feature (967)..(967): n is a, c, g, or t
  misc_feature (977)..(977): n is a, c, g, or t
  misc_feature (982)..(982): n is a, c, g, or t
  misc_feature (985)..(985): n is a, c, g, or t
  misc_feature (987)..(987): n is a, c, g, or t
  misc_feature (994)..(995): n is a, c, g, or t
  misc_feature (1000)..(1000): n is a, c, g, or t
  misc_feature (1002)..(1002): n is a, c, g, or t
  misc_feature (1005)..(1006): n is a, c, g, or t
  misc_feature (1010)..(1010): n is a, c, g, or t
  misc_feature (1013)..(1015): n is a, c, g, or t
  misc_feature (1018)..(1019): n is a, c, g, or t
  misc_feature (1023)..(1023): n is a, c, g, or t
  misc_feature (1025)..(1025): n is a, c, g, or t
  misc_feature (1029)..(1029): n is a, c, g, or t
  misc_feature (1032)..(1032): n is a, c, g, or t
  misc_feature (1034)..(1034): n is a, c, g, or t
  misc_feature (1037)..(1037): n is a, c, g, or t
  misc_feature (1040)..(1040): n is a, c, g, or t
  misc_feature (1044)..(1045): n is a, c, g, or t
  misc_feature (1050)..(1050): n is a, c, g, or t
  misc_feature (1052)..(1052): n is a, c, g, or t
  misc_feature (1055)..(1056): n is a, c, g, or t
  misc_feature (1059)..(1059): n is a, c, g, or t
  misc_feature (1065)..(1066): n is a, c, g, or t
  misc_feature (1068)..(1069): n is a, c, g, or t
  misc_feature (1073)..(1073): n is a, c, g, or t
  misc_feature (1075)..(1076): n is a, c, g, or t
  misc_feature (1080)..(1080): n is a, c, g, or t
  misc_feature (1091)..(1091): n is a, c, g, or t
  misc_feature (1096)..(1096): n is a, c, g, or t
  misc_feature (1106)..(1106): n is a, c, g, or t
  misc_feature (1110)..(1110): n is a, c, g, or t
  misc_feature (1117)..(1118): n is a, c, g, or t
  misc_feature (1121)..(1121): n is a, c, g, or t
  misc_feature (1132)..(1133): n is a, c, g, or t
  misc_feature (1136)..(1136): n is a, c, g, or t
  misc_feature (1138)..(1138): n is a, c, g, or t
  misc_feature (1140)..(1140): n is a, c, g, or t
  misc_feature (1142)..(1146): n is a, c, g, or t
  misc_feature (1151)..(1151): n is a, c, g, or t
  misc_feature (1153)..(1154): n is a, c, g, or t
  misc_feature (1159)..(1159): n is a, c, g, or t
  misc_feature (1162)..(1167): n is a, c, g, or t
  misc_feature (1170)..(1171): n is a, c, g, or t
  misc_feature (1173)..(1175): n is a, c, g, or t
  misc_feature (1179)..(1179): n is a, c, g, or t
  misc_feature (1181)..(1182): n is a, c, g, or t
  misc_feature (1187)..(1187): n is a, c, g, or t
  misc_feature (1189)..(1189): n is a, c, g, or t
  misc_feature (1195)..(1195): n is a, c, g, or t
  misc_feature (1198)..(1198): n is a, c, g, or t
ttagagaaattactatgagaggatcgcatcaccatcaccatcacggatcctatttaggtgacactatagaatcgtcgacccacgcgtccggccagctgtgcgaccacgcgtgctcgcaggccagcaagctcaagcgccacatgaagacgcacatgcacaaggccggctcgctggccggccgctccgacggtgacttccgccaccacgagagcgacccgtcgctgggccacgagccggaggaggaggacgaggaggaggaggaggaggaggaggagctgctactggagaacgagagccggcccgagtcgagcttcagcatggactcggagctgagccgcaaccgcgagaacggcggtggtggggtgcccggggtcccgggcgcggggggcggcgcggccaaggcgctggctgacgagaaggcgctggtgctgggcaaggtcatggagaacgtgggcctaggcgcactgccgcantacggcgagctcctgnccgacaagcanaagcgcggcgccttcctgaancgtgcggcggncggngngnacgcnngcnactacnactacgcgggcggctgnnggnacncttngcgcgggcggcncgttcaacggncgcggngngcggcttctcnccantcaccgancccttnnccgngttnttccngcganaatnctnnnncnctncncaannccngggntcnannacttccgccaatnnncntcaangntgnaaaaanacnttnnanntttnntccngcnctnntttantnccnattaaaaaaanntatnacttacaaannncttngttgngcntanactctcnttttgtnnttttnattaatgaatncctttnttggnctttncaaaaaatnnnnttnnatttttttttttnnnaantntnttcngnaatatncttcttccaaaaatnntgaatcnctttcncttnnttncanncccccccgggnatcctnncnttaaaaaatnttttnttncnattcttnnctttntnatnntctnttnnnaanntatnancttnctnanttnttntttnnctttntnttnntgnttgttnnannttcntnnaatntctttctcccnttttntaattttttnaatnattttcnntanttattttttannaantntntnnnnnttttntnnccttnttnnnnnnttnntnnnaacntnnataantnttattnttn

SEQ ID NO: 255 - DNA, 1429 bp, Homo Sapiens
  misc_feature (761)..(761): n is a, c, g, or t
  misc_feature (881)..(881): n is a, c, g, or t
  misc_feature (908)..(908): n is a, c, g, or t
  misc_feature (914)..(914): n is a, c, g, or t
  misc_feature (917)..(917): n is a, c, g, or t
  misc_feature (932)..(932): n is a, c, g, or t
  misc_feature (947)..(947): n is a, c, g, or t
  misc_feature (956)..(956): n is a, c, g, or t
  misc_feature (962)..(962): n is a, c, g, or t
  misc_feature (965)..(965): n is a, c, g, or t
  misc_feature (968)..(968): n is a, c, g, or t
  misc_feature (972)..(972): n is a, c, g, or t
  misc_feature (976)..(976): n is a, c, g, or t
  misc_feature (984)..(984): n is a, c, g, or t
  misc_feature (995)..(995): n is a, c, g, or t
  misc_feature (1000)..(1000): n is a, c, g, or t
  misc_feature (1020)..(1020): n is a, c, g, or t
  misc_feature (1035)..(1035): n is a, c, g, or t
  misc_feature (1041)..(1041): n is a, c, g, or t
  misc_feature (1051)..(1051): n is a, c, g, or t
  misc_feature (1053)..(1053): n is a, c, g, or t
  misc_feature (1057)..(1057): n is a, c, g, or t
  misc_feature (1064)..(1064): n is a, c, g, or t
  misc_feature (1066)..(1067): n is a, c, g, or t
  misc_feature (1069)..(1069): n is a, c, g, or t
  misc_feature (1098)..(1099): n is a, c, g, or t
  misc_feature (1102)..(1102): n is a, c, g, or t
  misc_feature (1109)..(1109): n is a, c, g, or t
  misc_feature (1114)..(1114): n is a, c, g, or t
  misc_feature (1120)..(1120): n is a, c, g, or t
  misc_feature (1122)..(1123): n is a, c, g, or t
  misc_feature (1126)..(1126): n is a, c, g, or t
  misc_feature (1128)..(1128): n is a, c, g, or t
  misc_feature (1133)..(1135): n is a, c, g, or t
  misc_feature (1138)..(1139): n is a, c, g, or t
  misc_feature (1141)..(1142): n is a, c, g, or t
  misc_feature (1144)..(1144): n is a, c, g, or t
  misc_feature (1148)..(1148): n is a, c, g, or t
  misc_feature (1151)..(1151): n is a, c, g, or t
  misc_feature (1155)..(1155): n is a, c, g, or t
  misc_feature (1161)..(1161): n is a, c, g, or t
  misc_feature (1163)..(1163): n is a, c, g, or t
  misc_feature (1165)..(1165): n is a, c, g, or t
  misc_feature (1174)..(1174): n is a, c, g, or t
  misc_feature (1180)..(1181): n is a, c, g, or t
  misc_feature (1184)..(1184): n is a, c, g, or t
  misc_feature (1192)..(1192): n is a, c, g, or t
  misc_feature (1194)..(1194): n is a, c, g, or t
  misc_feature (1198)..(1198): n is a, c, g, or t
  misc_feature (1207)..(1207): n is a, c, g, or t
  misc_feature (1212)..(1213): n is a, c, g, or t
  misc_feature (1217)..(1218): n is a, c, g, or t
  misc_feature (1220)..(1220): n is a, c, g, or t
  misc_feature (1224)..(1224): n is a, c, g, or t
  misc_feature (1227)..(1227): n is a, c, g, or t
  misc_feature (1231)..(1234): n is a, c, g, or t
  misc_feature (1236)..(1239): n is a, c, g, or t
  misc_feature (1249)..(1251): n is a, c, g, or t
  misc_feature (1257)..(1257): n is a, c, g, or t
  misc_feature (1264)..(1264): n is a, c, g, or t
  misc_feature (1280)..(1280): n is a, c, g, or t
  misc_feature (1287)..(1287): n is a, c, g, or t
  misc_feature (1304)..(1304): n is a, c, g, or t
  misc_feature (1306)..(1306): n is a, c, g, or t
  misc_feature (1314)..(1314): n is a, c, g, or t
  misc_feature (1318)..(1318): n is a, c, g, or t
  misc_feature (1330)..(1330): n is a, c, g, or t
  misc_feature (1335)..(1335): n is a, c, g, or t
  misc_feature (1344)..(1344): n is a, c, g, or t
  misc_feature (1349)..(1351): n is a, c, g, or t
  misc_feature (1354)..(1355): n is a, c, g, or t
  misc_feature (1358)..(1359): n is a, c, g, or t
  misc_feature (1363)..(1363): n is a, c, g, or t
  misc_feature (1376)..(1376): n is a, c, g, or t
  misc_feature (1378)..(1378): n is a, c, g, or t
  misc_feature (1381)..(1381): n is a, c, g, or t
  misc_feature (1383)..(1383): n is a, c, g, or t
  misc_feature (1389)..(1389): n is a, c, g, or t
  misc_feature (1395)..(1395): n is a, c, g, or t
  misc_feature (1398)..(1398): n is a, c, g, or t
  misc_feature (1403)..(1403): n is a, c, g, or t
  misc_feature (1405)..(1405): n is a, c, g, or t
  misc_feature (1417)..(1418): n is a, c, g, or t
  misc_feature (1420)..(1421): n is a, c, g, or t
  misc_feature (1424)..(1428): n is a, c, g, or t
gagaaattaactatggagaggatcgcatcaccatcaccatcacggatcctatttaggtgacactatagaatcgtcgacccacgcgtccggaaagaaagaaaagaaaaagaaaaaaagaaacgcctttgtactttgtgcagtcagtgggctcccaggaaaatgtttcttctccttttgtgggcataagcacagtgggctctggtgcattccggtcgacactctcctttatttggactgtaagtcagacctctgtgtataattacttcagcccctgattgctcccgggacaagctcctgcgccaagctttcactttagcttctgataagtcctgggccaatctaaatagcatctatgaatcatcccttcagctcctgattggtcccgggtcaaagtcctgggccaagctgagccacacttttttcaagacagcctgttaactaggcacatttccttctcttcctttcccagtccataaaaaccttgggccccagcctcacagaggtcaccccattcagaaactatctctgctggcaaagagctttcttctcttgcttatcaaactttcactctaacctcacctttgtgttcacgctccttaatctccctagaagtagaacaaagaactttcgatgctatctcagactatgagagactgttacatcttggtgcactgctgagactacaacacttggtttctttgagtttgactaaatattttacataggtgtaattatacagttttcctttttgactgtcttgntttacttaacagaatgttttcgagatttgtccttattgtagtacttttcaagatttccttatttttaaggctgaatgctatccagtgaatatacgtgccctgtttgtttgaatctactcntccttaaaaaatgtattcatttcccancaccgnagnggaaaaaaaaatttnccctatctttaaaanggatagcantttccnaanagnaaanctgngaaattcngcttgaaatcnccttnccaaaaaaaaaaaaaaaaancctggggaaaaatgnctaaanctcatttcgntnaagnaaaaagncnncnaaactgggaaaaaggaattccaaaaaccnnggnggtcccnaaaanagtttncnnccncnaaaannnttnntnnancaanaancccngggganangnaagccttgnatcccnnatnttttgggncncccnccccaaaanaaaannccanngncctnttnaggnnnncnnnnaaaccgggtnnnaaaaantgaaagntaacccagggggaaanttttggngggaaaaaagggggttncnaccgggcntttnctttttttttcnaaaantttaaaaanttttnnnggnnggnnaaanaaaaaggggtttntnccntnaaattngggggnaanccaanangggtttaaaaanngnnttnnnnnt

SEQ ID NO: 256 - DNA, 898 bp, Homo Sapiens
gagaggatcgcatcaccatcaccatcacggatcctatttaggtgacactatagaatcgtcgacccacgcgtccggctcgatctaggttctgcggcacgggatggcggaggcgcctcctgtctcaggtacttttaaattcaatacagatgctgctgaattcattcctcaggagaaaaaaaattctggtctaaattgtgggactcaaaggagactagactctaataggattggtagaagaaattacagttcaccacctccctgtcacctttccaggcaggtcccttatgatgaaatctctgctgttcatcagcatagttatcatccgtcaggaagcaaacctaagagtcagcagacgtctttccagtcctctccttgtaataaatcgcccaagagccatggccttcagaatcaaccttggcagaaattgaggaatgagaagcaccatatcagagtcaagaaagcacagagtcttgctgagcagacctcagatacagctggattagagagctcgaccagatcagagagtgggacagacctcagagagcatagtccttctgagagtgagaaggaagttgtgggtgcagatcccaggggagcaaaacccaaaaaagcaacacagtttgtatacagctatggtagaggaccaaaagtcaaggggaaactcaaatgtgaatggagtaaccgaacaactccaaaaccggaggatgctggacccgaaagtaccaaacctgtgggggttttccaccctgactcttcagaggcatcctctagaaaaggagtattggatgggtatggagccagacgaaatgagcagagaagatacccacagaaaaggcctccctgggaagtggagggggccaggccacgaccaggcagaaatccaccaaaacaggagggc

SEQ ID NO: 257 - DNA, 1200 bp, Homo Sapiens
  misc_feature (880)..(880): n is a, c, g, or t
  misc_feature (913)..(913): n is a, c, g, or t
  misc_feature (947)..(947): n is a, c, g, or t
  misc_feature (962)..(962): n is a, c, g, or t
  misc_feature (974)..(974): n is a, c, g, or t
  misc_feature (989)..(989): n is a, c, g, or t
  misc_feature (994)..(994): n is a, c, g, or t
  misc_feature (999)..(999): n is a, c, g, or t
  misc_feature (1002)..(1003): n is a, c, g, or t
  misc_feature (1011)..(1011): n is a, c, g, or t
  misc_feature (1046)..(1046): n is a, c, g, or t
  misc_feature (1073)..(1073): n is a, c, g, or t
  misc_feature (1075)..(1075): n is a, c, g, or t
  misc_feature (1077)..(1077): n is a, c, g, or t
  misc_feature (1082)..(1086): n is a, c, g, or t
  misc_feature (1088)..(1088): n is a, c, g, or t
  misc_feature (1097)..(1097): n is a, c, g, or t
  misc_feature (1103)..(1104): n is a, c, g, or t
  misc_feature (1111)..(1112): n is a, c, g, or t
  misc_feature (1117)..(1117): n is a, c, g, or t
  misc_feature (1126)..(1126): n is a, c, g, or t
  misc_feature (1145)..(1145): n is a, c, g, or t
  misc_feature (1153)..(1153): n is a, c, g, or t
  misc_feature (1158)..(1158): n is a, c, g, or t
  misc_feature (1163)..(1163): n is a, c, g, or t
  misc_feature (1167)..(1167): n is a, c, g, or t
  misc_feature (1173)..(1173): n is a, c, g, or t
  misc_feature (1184)..(1186): n is a, c, g, or t
  misc_feature (1189)..(1189): n is a, c, g, or t
  misc_feature (1197)..(1197): n is a, c, g, or t
tagagaaattactatgagaggatcgcatcaccatcaccatcacggatcctatttaggtgacactatagaatcgtcgacccacgcgtccgggctcatccaaaatagaggaagcatgcgaaatctacgccagagcagcaaacatgttcaaaatggccaaaaactggagtgctgctggaaacgcgttctgccaggctgcacagctgcacctgcagctccagagcaagcacgacgcagccacctgctttgtggacgctggcaacgcattcaagaaagccgacccccaagaggccattaactgtttgatgcgagcaatcgagatctacacagacatgggccgattcacgattgcggccaagcaccacatctccattgctgagatctatgagacagagttggtggacatcgagaaggccattgcccactacgagcagtctgcagactactacaaaggcgaggagtccaacagctcagccaacaagtgtctgctgaaggtggctggttacgctgcgctgctggagcagtatcagaaggccattgacatctacgaacaggtggggaccaatgccatggacagccccctcctcaagtacagcgccaaagactacttcttcaaggcggccctctgccacttctgcatcgacatgctcaacgccaagctggctgtccaaaagtatgaggagctgttcccagctttctctgattcccgggaatgcaagttgatgaaaaaattgctagaggcccacgaggagcagaatgtggacagctacaccgagtcggtgaaggaatacgactccatctcccggctggaccagtggctcaccaccatgctgctgcgcatcaagaagaccatccagggcgatgaggaggacctgcgctaaanccccacccagcccccccagtggcccgtctttcntgtcccatctgctcaaaaaagaaggtgggggccnaaaacttgctggaanagcttccctccnttcccatctggggantgccncgggnccnnattgggcnaggggcacccggggtcaacatgcaagggcccccanaagcccaggctgctggccggaaatccncntnttttnnnnnanattccttgncccctnntccattnnttaancccccatangggcccttccccccaaaancagctgtnaaaanttttnaaanaaactntttctaagggnnnctnccgggaanttg

SEQ ID NO: 258 - DNA, 1022 bp, Homo Sapiens
agattaactatgagaggtcgcatcaccatcaccatcacggatcctatttaggtgacactatagaatcgtcgacccacgcgtccgggcggcggagctgggccgggcccgagcggatcgcgggctcgggctgcggggctccggctgcgggcgctgggccgcgaggcgcggagcttgggagcggagcccaggccgtgccgcgcggcgccatgaagggcaaggaggagaaggagggcggcgcacggctgggcgctggcggcggaagccccgagaagagcccgagcgcgcaggagctcaaggagcagggcaatcgtctgttcgtgggccgaaagtacccggaggcggcggcctgctacggccgcgcgatcacccggaacccgctggtggccgtgtattacaccaaccgggccttgtgctacctgaagatgcagcagcacgagcaggccctggccgactgccggcgcgccctggagctggacgggcagtctgtgaaggcgcacttcttcctggggcagtgccagctggagatggagagctatgatgaggccatcgccaatctgcagcgagcttacagcctggccaaggagcagcggctgaacttcggggacgacatccccagcgctcttcgaatcgcgaagaagaagcgctggaacagcattgaggagcggcgcatccaccaggagagcgagctgcactcctacctctccaggctcattgccgcggagcgtgagagggagctggaagagtgccagcgaaaccacgagggtgatgaggacgacagccacgtccgggcccagcaggcctgcattgaggccaagcacgacaagtacatggcggacatggacgagcttttttctcaggtggatgagaagaggaagaagcgagacatccccgactacctgtgtggcaagatcagctttgagctgatgcgggagccgtgcatcacgcccagtggcatcacctacgaccgcaaggacatcgaggagcacctgcagcgtgtgggtcattttgaccccgtgacccgg

SEQ ID NO: 259 - DNA, 1370 bp, Homo Sapiens
  misc_feature (755)..(757): n is a, c, g, or t
  misc_feature (763)..(763): n is a, c, g, or t
  misc_feature (765)..(765): n is a, c, g, or t
  misc_feature (767)..(827): n is a, c, g, or t
  misc_feature (831)..(831): n is a, c, g, or t
  misc_feature (836)..(836): n is a, c, g, or t
  misc_feature (838)..(838): n is a, c, g, or t
  misc_feature (842)..(842): n is a, c, g, or t
  misc_feature (844)..(844): n is a, c, g, or t
  misc_feature (846)..(846): n is a, c, g, or t
  misc_feature (851)..(851): n is a, c, g, or t
  misc_feature (859)..(859): n is a, c, g, or t
  misc_feature (868)..(868): n is a, c, g, or t
  misc_feature (874)..(874): n is a, c, g, or t
  misc_feature (887)..(888): n is a, c, g, or t
  misc_feature (897)..(899): n is a, c, g, or t
  misc_feature (902)..(902): n is a, c, g, or t
  misc_feature (911)..(911): n is a, c, g, or t
  misc_feature (937)..(937): n is a, c, g, or t
  misc_feature (939)..(939): n is a, c, g, or t
  misc_feature (942)..(942): n is a, c, g, or t
  misc_feature (950)..(950): n is a, c, g, or t
  misc_feature (971)..(972): n is a, c, g, or t
  misc_feature (978)..(978): n is a, c, g, or t
  misc_feature (981)..(981): n is a, c, g, or t
  misc_feature (986)..(986): n is a, c, g, or t
  misc_feature (995)..(995): n is a, c, g, or t
  misc_feature (1001)..(1003): n is a, c, g, or t
  misc_feature (1006)..(1006): n is a, c, g, or t
  misc_feature (1008)..(1008): n is a, c, g, or t
  misc_feature (1029)..(1029): n is a, c, g, or t
  misc_feature (1034)..(1034): n is a, c, g, or t
  misc_feature (1037)..(1037): n is a, c, g, or t
  misc_feature (1039)..(1039): n is a, c, g, or t
  misc_feature (1041)..(1041): n is a, c, g, or t
  misc_feature (1047)..(1048): n is a, c, g, or t
  misc_feature (1051)..(1051): n is a, c, g, or t
  misc_feature (1057)..(1057): n is a, c, g, or t
  misc_feature (1062)..(1062): n is a, c, g, or t
  misc_feature (1065)..(1067): n is a, c, g, or t
  misc_feature (1070)..(1070): n is a, c, g, or t
  misc_feature (1084)..(1086): n is a, c, g, or t
  misc_feature (1093)..(1094): n is a, c, g, or t
  misc_feature (1097)..(1099): n is a, c, g, or t
  misc_feature (1101)..(1101): n is a, c, g, or t
  misc_feature (1103)..(1104): n is a, c, g, or t
  misc_feature (1106)..(1106): n is a, c, g, or t
  misc_feature (1108)..(1108): n is a, c, g, or t
  misc_feature (1117)..(1117): n is a, c, g, or t
  misc_feature (1122)..(1122): n is a, c, g, or t
  misc_feature (1124)..(1124): n is a, c, g, or t
  misc_feature (1129)..(1130): n is a, c, g, or t
  misc_feature (1138)..(1140): n is a, c, g, or t
  misc_feature (1143)..(1143): n is a, c, g, or t
  misc_feature (1148)..(1148): n is a, c, g, or t
  misc_feature (1155)..(1156): n is a, c, g, or t
  misc_feature (1167)..(1167): n is a, c, g, or t
  misc_feature (1171)..(1171): n is a, c, g, or t
  misc_feature (1177)..(1177): n is a, c, g, or t
  misc_feature (1179)..(1181): n is a, c, g, or t
  misc_feature (1187)..(1187): n is a, c, g, or t
  misc_feature (1200)..(1201): n is a, c, g, or t
  misc_feature (1206)..(1206): n is a, c, g, or t
  misc_feature (1209)..(1209): n is a, c, g, or t
  misc_feature (1213)..(1213): n is a, c, g, or t
  misc_feature (1216)..(1216): n is a, c, g, or t
  misc_feature (1220)..(1221): n is a, c, g, or t
  misc_feature (1231)..(1237): n is a, c, g, or t
  misc_feature (1239)..(1240): n is a, c, g, or t
  misc_feature (1243)..(1243): n is a, c, g, or t
  misc_feature (1245)..(1245): n is a, c, g, or t
  misc_feature (1249)..(1249): n is a, c, g, or t
  misc_feature (1251)..(1251): n is a, c, g, or t
  misc_feature (1259)..(1260): n is a, c, g, or t
  misc_feature (1262)..(1262): n is a, c, g, or t
  misc_feature (1268)..(1269): n is a, c, g, or t
  misc_feature (1283)..(1287): n is a, c, g, or t
  misc_feature (1290)..(1290): n is a, c, g, or t
  misc_feature (1295)..(1296): n is a, c, g, or t
  misc_feature (1301)..(1301): n is a, c, g, or t
  misc_feature (1303)..(1305): n is a, c, g, or t
  misc_feature (1307)..(1307): n is a, c, g, or t
  misc_feature (1311)..(1312): n is a, c, g, or t
  misc_feature (1318)..(1318): n is a, c, g, or t
  misc_feature (1320)..(1321): n is a, c, g, or t
  misc_feature (1327)..(1327): n is a, c, g, or t
  misc_feature (1331)..(1331): n is a, c, g, or t
  misc_feature (1335)..(1339): n is a, c, g, or t
  misc_feature (1342)..(1342): n is a, c, g, or t
  misc_feature (1344)..(1344): n is a, c, g, or t
  misc_feature (1346)..(1347): n is a, c, g, or t
  misc_feature (1349)..(1349): n is a, c, g, or t
  misc_feature (1354)..(1354): n is a, c, g, or t
  misc_feature (1359)..(1359): n is a, c, g, or t
  misc_feature (1366)..(1367): n is a, c, g, or t
  misc_feature (1370)..(1370): n is a, c, g, or t
tagagaaattactatgagaggatcgcatcaccatcaccatcacggatcctatttaggtgacactatagaatcgtcgacccacgcgtccgaccagctctctgctctcccagcgcagcgccgccgcccggcccctccagcttcccggaccatggccaacctggagcgcaccttcatcgccatcaagccggacggcgtgcagcgcggcctggtgggcgagatcatcaagcgcttcgagcagaagggattccgcctcgtggccatgaagttcctccgggcctctgaagaacacctgaagcagcactacattgacctgaaagaccgaccattcttccctgggctggtgaagtacatgaactcagggccggttgtggccatggtctgggaggggctgaacgtggtgaagacaggccgagtgatgcttggggagaccaatccagcagattcaaagccaggcaccattcgtggggacttctgcattcaggttggcaggaacatcattcatggcagtgattcagtaaaaagtgctgaaaaagaaatcagcctatggtttaagcctgaagaactggttgactacaagtcttgtgctcatgactgggtctatgaataagaggtggacacaacagcagtctccttcagcacggcgtggtgtgtccctggacacagctcttcattccattgacttagaggcaacaggattgatcattcttttatagagcatatttgccaataaagcttttggaagcctgaagaattannnaaaaananannnnnnnnnnnnnnnnnnnnnnnnnnnnnnnnnnnnnnnnnnnnnnnnnnnnnnnnnnnnngggnggccncncccnananggagncgaataancttaattanctgaanctggactcctttnnaaaaatccnnnaangaacctccnaaactcccttggattttttcaaaacncncgnttgccccnggggtttttttttggggaaannccaacnacnttggnaaatttttncgggannnaangnacctaaattgggaaaaaaaanccctnggnantncccccnnttnaaaatncccanggnnnccnaaaaaaaaattttnnngatttcnnccnnntncnnangnaccaaaaancaaancnttacnnggaattannnccnttttnaaaaccnnaaaaaaaaaanccantttttncnnncttttnaatttttcccccnnaaaanccncccnaantttnngaaaaaaaannnnnnngnnaangnaaantncccttttnncntttttnnaaaaaaaaattttnnnnnganaaaannaaaantnnngntttnnattttnanngggggngggnaaannnnnttncngnntnaaaanttttnccccccnngtn

SEQ ID NO: 260 - DNA, 1198 bp, Homo Sapiens
  misc_feature (320)..(320): n is a, c, g, or t
  misc_feature (546)..(546): n is a, c, g, or t
  misc_feature (710)..(710): n is a, c, g, or t
  misc_feature (717)..(717): n is a, c, g, or t
  misc_feature (722)..(722): n is a, c, g, or t
  misc_feature (776)..(776): n is a, c, g, or t
  misc_feature (778)..(778): n is a, c, g, or t
  misc_feature (792)..(792): n is a, c, g, or t
  misc_feature (802)..(802): n is a, c, g, or t
  misc_feature (804)..(804): n is a, c, g, or t
  misc_feature (809)..(810): n is a, c, g, or t
  misc_feature (812)..(812): n is a, c, g, or t
  misc_feature (814)..(815): n is a, c, g, or t
  misc_feature (818)..(818): n is a, c, g, or t
  misc_feature (820)..(821): n is a, c, g, or t
  misc_feature (823)..(823): n is a, c, g, or t
  misc_feature (826)..(826): n is a, c, g, or t
  misc_feature (828)..(829): n is a, c, g, or t
  misc_feature (831)..(831): n is a, c, g, or t
  misc_feature (837)..(837): n is a, c, g, or t
  misc_feature (843)..(843): n is a, c, g, or t
  misc_feature (846)..(846): n is a, c, g, or t
  misc_feature (856)..(857): n is a, c, g, or t
  misc_feature (863)..(863): n is a, c, g, or t
  misc_feature (870)..(872): n is a, c, g, or t
  misc_feature (875)..(875): n is a, c, g, or t
  misc_feature (879)..(884): n is a, c, g, or t
  misc_feature (887)..(887): n is a, c, g, or t
  misc_feature (891)..(893): n is a, c, g, or t
  misc_feature (895)..(895): n is a, c, g, or t
  misc_feature (902)..(902): n is a, c, g, or t
  misc_feature (916)..(916): n is a, c, g, or t
  misc_feature (918)..(920): n is a, c, g, or t
  misc_feature (926)..(927): n is a, c, g, or t
  misc_feature (930)..(930): n is a, c, g, or t
  misc_feature (934)..(934): n is a, c, g, or t
  misc_feature (936)..(937): n is a, c, g, or t
  misc_feature (940)..(941): n is a, c, g, or t
  misc_feature (943)..(943): n is a, c, g, or t
  misc_feature (945)..(945): n is a, c, g, or t
  misc_feature (948)..(949): n is a, c, g, or t
  misc_feature (952)..(952): n is a, c, g, or t
  misc_feature (956)..(956): n is a, c, g, or t
  misc_feature (962)..(962): n is a, c, g, or t
  misc_feature (964)..(965): n is a, c, g, or t
  misc_feature (968)..(969): n is a, c, g, or t
  misc_feature (972)..(973): n is a, c, g, or t
  misc_feature (975)..(976): n is a, c, g, or t
  misc_feature (978)..(978): n is a, c, g, or t
  misc_feature (981)..(981): n is a, c, g, or t
  misc_feature (985)..(985): n is a, c, g, or t
  misc_feature (987)..(987): n is a, c, g, or t
  misc_feature (993)..(993): n is a, c, g, or t
  misc_feature (1001)..(1002): n is a, c, g, or t
  misc_feature (1007)..(1008): n is a, c, g, or t
  misc_feature (1015)..(1016): n is a, c, g, or t
  misc_feature (1018)..(1018): n is a, c, g, or t
  misc_feature (1028)..(1029): n is a, c, g, or t
  misc_feature (1032)..(1032): n is a, c, g, or t
  misc_feature (1036)..(1038): n is a, c, g, or t
  misc_feature (1044)..(1049): n is a, c, g, or t
  misc_feature (1062)..(1062): n is a, c, g, or t
  misc_feature (1064)..(1068): n is a, c, g, or t
  misc_feature (1071)..(1076): n is a, c, g, or t
  misc_feature (1079)..(1079): n is a, c, g, or t
  misc_feature (1086)..(1088): n is a, c, g, or t
  misc_feature (1094)..(1095): n is a, c, g, or t
  misc_feature (1097)..(1097): n is a, c, g, or t
  misc_feature (1099)..(1099): n is a, c, g, or t
  misc_feature (1106)..(1106): n is a, c, g, or t
  misc_feature (1108)..(1109): n is a, c, g, or t
  misc_feature (1112)..(1113): n is a, c, g, or t
  misc_feature (1120)..(1122): n is a, c, g, or t
  misc_feature (1124)..(1124): n is a, c, g, or t
  misc_feature (1128)..(1128): n is a, c, g, or t
  misc_feature (1131)..(1132): n is a, c, g, or t
  misc_feature (1142)..(1143): n is a, c, g, or t
  misc_feature (1149)..(1150): n is a, c, g, or t
  misc_feature (1154)..(1165): n is a, c, g, or t
  misc_feature (1169)..(1170): n is a, c, g, or t
  misc_feature (1173)..(1180): n is a, c, g, or t
  misc_feature (1183)..(1183): n is a, c, g, or t
  misc_feature (1186)..(1187): n is a, c, g, or t
  misc_feature (1191)..(1192): n is a, c, g, or t
  misc_feature (1194)..(1197): n is a, c, g, or t
tagagaaattactatgagaggatcgcatcaccatcaccatcacggatcctatttaggtgacactatagaatcgtcgacccacgcgtccggcctcgccagctcgccccggcactgcgcacttgccagccagtccgcccgtccggagcccggctcgctggggcagcatggcggggtcgccgctgctctgggggccgcgggccgggggcgtcggccttttggtgctgctgctgctcggcctgtttcggccgccccccgcgctctgcgcgcggccggtaaaggagccccgcggcctaagcgcagcgtctccgcccttggctganactggcgctcctcgccgcttccggcggtcagtgccccgaggtgaggcggcgggggcggtgcaggagctggcgcgggcgctggcgcatctgctggaggccgaacgtcaggagcgggcgcgggccgaggcgcaggaggctgaggatcagcaggcgcgcgtcctggcgcagctgctgcgcgtctggggcgccccccgcaactctgatccggctctgggcctggacgacnaccccgacgcgcctgcagcgcagctcgctcgcgctctgctccgcgcccgccttgaccctgccgccctcgcagcccagcttgtccccgcgcccgtccccgccgcggcgctccgaccccggcccccggtctacaacgacggccccgcgggcccggatgctgaagangcaggcnacaanacacccgacgtggaacccgaactgttgaagtacttgctgggacggattcttgcngnaaacgcggactccnaaggggtggnanccccnngncnnctncnncntgncnncnaacaanaatgtnggnctctgaactnncccccntgaaagnnntgnttgnnnnnnctncttnnntntaaaaancctaaaaaaacccngnnncccaanntgnctgnannccnncntnttnncancctnaaaaantnnccnnaanncnntnaancctngnaaaccnaaaaaatnnccccnncaatccnncnaaaaaaaatnnttncccnnnaaaaannnnnnaaaaaaaattaancnnnnnaannnnnnccntttaaannnaaaaanncntnaaccctngnnccnnaaaaaannnantttnaannaaaaaaaaannaaaaannaaannnnnnnnnnnncccnnaannnnnnnnaanaannttanntnnnna

SEQ ID NO: 261 - DNA, 1311 bp, Homo Sapiens
  misc_feature (556)..(556): n is a, c, g, or t
  misc_feature (559)..(560): n is a, c, g, or t
  misc_feature (563)..(564): n is a, c, g, or t
  misc_feature (566)..(567): n is a, c, g, or t
  misc_feature (569)..(574): n is a, c, g, or t
  misc_feature (576)..(576): n is a, c, g, or t
  misc_feature (578)..(580): n is a, c, g, or t
  misc_feature (582)..(583): n is a, c, g, or t
  misc_feature (586)..(1311): n is a, c, g, or t
taatagagaaattactatgagaggatcgcatcaccatcaccatcacggatcctatttaggtgacactatagaatcgtcgacccacgcgtccggctgggcggcgggtgccggtgcgcacggagccgagccggggctcccgttgcgctgcaccgcgttgggtcggagtcccaggacttcagcggagatccgcgcgctgcgacggccggtgcagagcccgccgagcgcccagtcccggcccggggctgagttgggggcatgctctagccgcccccccggagcccgggagagaacccaggagcgccgccgcccagccccagcgccccgagcggaaccgctgcgaaggggccctgaacggccgtcgccctccctacgggcagcccccgggggttggcgaccgaagtctaggttttcgagaaagccagggtgggaaccctaactggactcttcgggacccccaggaaggatctgaggcctgagccatcctcctttctaccctgtctgccccccaggactgggcagttgcaggaggccctggggggcagacagggtagaaagntgnntgnnanngnnnnnngntnnntnntgnnnnnnnnnnnnnnnnnnnnnnnnnnnnnnnnnnnnnnnnnnnnnnnnnnnnnnnnnnnnnnnnnnnnnnnnnnnnnnnnnnnnnnnnnnnnnnnnnnnnnnnnnnnnnnnnnnnnnnnnnnnnnnnnnnnnnnnnnnnnnnnnnnnnnnnnnnnnnnnnnnnnnnnnnnnnnnnnnnnnnnnnnnnnnnnnnnnnnnnnnnnnnnnnnnnnnnnnnnnnnnnnnnnnnnnnnnnnnnnnnnnnnnnnnnnnnnnnnnnnnnnnnnnnnnnnnnnnnnnnnnnnnnnnnnnnnnnnnnnnnnnnnnnnnnnnnnnnnnnnnnnnnnnnnnnnnnnnnnnnnnnnnnnnnnnnnnnnnnnnnnnnnnnnnnnnnnnnnnnnnnnnnnnnnnnnnnnnnnnnnnnnnnnnnnnnnnnnnnnnnnnnnnnnnnnnnnnnnnnnnnnnnnnnnnnnnnnnnnnnnnnnnnnnnnnnnnnnnnnnnnnnnnnnnnnnnnnnnnnnnnnnnnnnnnnnnnnnnnnnnnnnnnnnnnnnnnnnnnnnnnnnnnnnnnnnnnnnnnnnnnnnnnnnnnnnnnnnnnnnnnnnnnnnnnnnnnnnnnnnnnnnnnnnnnnnnnnnnnnnnnnnnnnnnnnnnnnnnnnnnnnnnnnnnnnnnnnnnnnnnnnnnnnnnnnnnnnnnnnnnnnnnnnnnnnnnnnnnnnnnnnnnnnnnnnnnnnnnnnnnnnnnn

SEQ ID NO: 262 - DNA, 1413 bp, Homo Sapiens
  misc_feature (756)..(756): n is a, c, g, or t
  misc_feature (790)..(790): n is a, c, g, or t
  misc_feature (839)..(839): n is a, c, g, or t
  misc_feature (867)..(867): n is a, c, g, or t
  misc_feature (927)..(927): n is a, c, g, or t
  misc_feature (933)..(933): n is a, c, g, or t
  misc_feature (939)..(939): n is a, c, g, or t
  misc_feature (964)..(964): n is a, c, g, or t
  misc_feature (966)..(966): n is a, c, g, or t
  misc_feature (969)..(969): n is a, c, g, or t
  misc_feature (974)..(974): n is a, c, g, or t
  misc_feature (977)..(977): n is a, c, g, or t
  misc_feature (999)..(999): n is a, c, g, or t
  misc_feature (1002)..(1002): n is a, c, g, or t
  misc_feature (1004)..(1004): n is a, c, g, or t
  misc_feature (1006)..(1006): n is a, c, g, or t
  misc_feature (1010)..(1010): n is a, c, g, or t
  misc_feature (1014)..(1014): n is a, c, g, or t
  misc_feature (1019)..(1019): n is a, c, g, or t
  misc_feature (1031)..(1031): n is a, c, g, or t
  misc_feature (1039)..(1039): n is a, c, g, or t
  misc_feature (1045)..(1045): n is a, c, g, or t
  misc_feature (1051)..(1051): n is a, c, g, or t
  misc_feature (1054)..(1054): n is a, c, g, or t
  misc_feature (1056)..(1056): n is a, c, g, or t
  misc_feature (1058)..(1058): n is a, c, g, or t
  misc_feature (1060)..(1060): n is a, c, g, or t
  misc_feature (1062)..(1062): n is a, c, g, or t
  misc_feature (1081)..(1081): n is a, c, g, or t
  misc_feature (1084)..(1084): n is a, c, g, or t
  misc_feature (1086)..(1086): n is a, c, g, or t
  misc_feature (1088)..(1088): n is a, c, g, or t
  misc_feature (1090)..(1090): n is a, c, g, or t
  misc_feature (1114)..(1114): n is a, c, g, or t
  misc_feature (1120)..(1121): n is a, c, g, or t
  misc_feature (1124)..(1124): n is a, c, g, or t
  misc_feature (1126)..(1126): n is a, c, g, or t
  misc_feature (1133)..(1133): n is a, c, g, or t
  misc_feature (1135)..(1135): n is a, c, g, or t
  misc_feature (1148)..(1148): n is a, c, g, or t
  misc_feature (1161)..(1161): n is a, c, g, or t
  misc_feature (1166)..(1166): n is a, c, g, or t
  misc_feature (1170)..(1170): n is a, c, g, or t
  misc_feature (1173)..(1173): n is a, c, g, or t
  misc_feature (1180)..(1180): n is a, c, g, or t
  misc_feature (1184)..(1184): n is a, c, g, or t
  misc_feature (1190)..(1190): n is a, c, g, or t
  misc_feature (1195)..(1195): n is a, c, g, or t
  misc_feature (1200)..(1200): n is a, c, g, or t
  misc_feature (1203)..(1204): n is a, c, g, or t
  misc_feature (1210)..(1211): n is a, c, g, or t
  misc_feature (1228)..(1229): n is a, c, g, or t
  misc_feature (1234)..(1234): n is a, c, g, or t
  misc_feature (1243)..(1243): n is a, c, g, or t
  misc_feature (1247)..(1248): n is a, c, g, or t
  misc_feature (1255)..(1255): n is a, c, g, or t
  misc_feature (1260)..(1260): n is a, c, g, or t
  misc_feature (1267)..(1267): n is a, c, g, or t
  misc_feature (1270)..(1270): n is a, c, g, or t
  misc_feature (1274)..(1275): n is a, c, g, or t
  misc_feature (1279)..(1279): n is a, c, g, or t
  misc_feature (1289)..(1289): n is a, c, g, or t
  misc_feature (1291)..(1292): n is a, c, g, or t
  misc_feature (1294)..(1294): n is a, c, g, or t
  misc_feature (1301)..(1301): n is a, c, g, or t
  misc_feature (1303)..(1303): n is a, c, g, or t
  misc_feature (1307)..(1307): n is a, c, g, or t
  misc_feature (1313)..(1313): n is a, c, g, or t
  misc_feature (1320)..(1320): n is a, c, g, or t
  misc_feature (1323)..(1323): n is a, c, g, or t
  misc_feature (1325)..(1325): n is a, c, g, or t
  misc_feature (1333)..(1333): n is a, c, g, or t
  misc_feature (1339)..(1339): n is a, c, g, or t
  misc_feature (1345)..(1345): n is a, c, g, or t
  misc_feature (1351)..(1351): n is a, c, g, or t
  misc_feature (1353)..(1353): n is a, c, g, or t
  misc_feature (1362)..(1362): n is a, c, g, or t
  misc_feature (1364)..(1364): n is a, c, g, or t
  misc_feature (1366)..(1367): n is a, c, g, or t
  misc_feature (1374)..(1374): n is a, c, g, or t
  misc_feature (1378)..(1378): n is a, c, g, or t
  misc_feature (1384)..(1384): n is a, c, g, or t
  misc_feature (1386)..(1386): n is a, c, g, or t
  misc_feature (1396)..(1396): n is a, c, g, or t
  misc_feature (1399)..(1399): n is a, c, g, or t
  misc_feature (1405)..(1405): n is a, c, g, or t
ggaatagagagaattactatgagaggatcgcatcaccatcaccatcacggatcctatttaggtgacactatagaatcgtcgacccacgcgtccgctgggactctgggagcagcagtgaagtcttcagatactgccctacctccacctccagtgcctcccaaatctgaagccgtcagagaagaatgccggctcctgaacgccccacctgttccaccccgaagcgcaaagcctttgtccaccagtccctccatccctcctcgcacagtcaagccagcgcggcaacagactcgctctcccagccccaccttgtcctactattcttcagggctacacaacatcgtcactaaaactgacacaaatccttctgaaagcactcctgtttcctgctatccatgtaaccgagtgaaaactgattctgtggacctgaaatccccgtttggaagtccttctgctgaagctgtgtcctctcggctctcatggcctaaccattattcaggagcatcagaaagccagaccaggagtgacttcctgctggatccaagcaggagttatagttaccctagacaaaagacgccaggcacaccaaagagaaactgcccagcaccttttgattttgatggctgtgagctcctggccagccccactagcccagtcactgcagaattcagtagcagcgtctctggttgtcccaagtcagccagctactctctggagagcacagatgtgaaatctcttgcagctggtgtgacaaagcanagtacgtcatgccctgccttaccccccagggctnccaaaactagtggaagagaaggtcgcctccgaaacatctcctttgcctntgaaaattgatggtgctgaaggaaagancccaagtctggggtcaccaaaatctctcggagggaccagtatttttggttaaaaaggggnatggcnggaaantcttctctggcctcctaaccttttntnatntccgnctncaatctccaagtgggccccaanatncntntggngaanggttnccccatggaagnccacctgntgaacntaatcnggnantntntnaggagggaaagggtccaantcntnangnttcattggttttggtccaaaaaantcaaannccntntttggtnangaaaaaaaatgangggaacctttttntttcnctanagnaaaaaancttnttcaanaattncaaantannaaattnnagggaaaaaaaaaaagnnatttnttttagggngggnnccaaaantaacnaaaaacnccngcannaagngaaaaaaatntnnanggggggntnaaangggggnggggaanaantntttttttnaaaaanctttcntgaaangnaaaaaaacntntnntcaattntttnggggananctttttcttnaantttttnaaaaaaaa

SEQ ID NO: 263 - DNA, 1327 bp, Homo Sapiens
  misc_feature (1)..(1): n is a, c, g, or t
  misc_feature (937)..(937): n is a, c, g, or t
  misc_feature (1029)..(1029): n is a, c, g, or t
  misc_feature (1043)..(1043): n is a, c, g, or t
  misc_feature (1045)..(1045): n is a, c, g, or t
  misc_feature (1062)..(1062): n is a, c, g, or t
  misc_feature (1065)..(1065): n is a, c, g, or t
  misc_feature (1079)..(1079): n is a, c, g, or t
  misc_feature (1081)..(1081): n is a, c, g, or t
  misc_feature (1094)..(1094): n is a, c, g, or t
  misc_feature (1111)..(1111): n is a, c, g, or t
  misc_feature (1121)..(1121): n is a, c, g, or t
  misc_feature (1129)..(1129): n is a, c, g, or t
  misc_feature (1138)..(1138): n is a, c, g, or t
  misc_feature (1162)..(1162): n is a, c, g, or t
  misc_feature (1192)..(1193): n is a, c, g, or t
  misc_feature (1201)..(1201): n is a, c, g, or t
  misc_feature (1205)..(1205): n is a, c, g, or t
  misc_feature (1209)..(1210): n is a, c, g, or t
  misc_feature (1222)..(1222): n is a, c, g, or t
  misc_feature (1225)..(1225): n is a, c, g, or t
  misc_feature (1229)..(1231): n is a, c, g, or t
  misc_feature (1235)..(1236): n is a, c, g, or t
  misc_feature (1241)..(1241): n is a, c, g, or t
  misc_feature (1243)..(1243): n is a, c, g, or t
  misc_feature (1251)..(1251): n is a, c, g, or t
  misc_feature (1255)..(1255): n is a, c, g, or t
  misc_feature (1260)..(1260): n is a, c, g, or t
  misc_feature (1268)..(1269): n is a, c, g, or t
  misc_feature (1274)..(1274): n is a, c, g, or t
  misc_feature (1282)..(1282): n is a, c, g, or t
  misc_feature (1285)..(1285): n is a, c, g, or t
  misc_feature (1295)..(1295): n is a, c, g, or t
  misc_feature (1298)..(1299): n is a, c, g, or t
ntagagatattactatgagaggatcgcatcaccatcaccatcacggatcctatttaggtgacactatagaatcgtcgacccacgcgtccgcgccgcccaagatgccgaaaggaaagaaggccaagggaaagaaggtggctccggccccagctgtcgtgaagaagcaggaggctaagaaagtggtgaatcccctgtttgagaaaaggcctaagaattttggcattggacaggacatccagcccaaaagagacctcacccgctttgtgaaatggccccgctatatcaggttgcagcggcagagagccatcctctataagcggctgaaagtgcctcctgcgattaaccagttcacccaggccctggaccgccaaacagctactcagctgcttaagctggcccacaagtacagaccagagacaaagcaagagaagaagcagagactgttggcccgggccgagaagaaggctgctggcaaaggggacgtcccaacgaagagaccacctgtccttcgagcaggagttaacaccgtcaccaccttggtggagaacaagaaagctcagctggtggtgattgcacacgacgtggatcccatcgagctggttgtcttcttgcctgccctgtgtcgtaaaatgggggtcccttactgcattatcaagggaaaggcaagactgggacgtctagtccacaggaagacctgcaccactgtcgccttcacacaggtgaactcggaagacaaaggcgctttggctaagctggtggaagctatcaggaccaattacaatgacagatacgatgagatccgccgtcactggggtggcaatgtcctgggtcctaagtctgtggctcgtatcgccaagctcgaaaaggcaaaggctaaagaacttgccactaaactgggttaaatgtacactgttgagttttctgtacataaaaatanttgaaataatacaaattttccttcaaaaaaaaaaaaaaaaaaagggcggccgctcctatagtgagtcgtattaagcttaattagctgaactnggactcctgttgananatccagtaatgacctcnaanttcctctggatttntnaaaacgctcggtngcccccggggttttttnttggtgaaantcaagctncttggcganattttcggagctaggaagctaaantgggaaaaaaaatcctggatttcccccgtnnaatttccnatgnctcnnaaaaaaatttgnggntttnnncgtnncccangncctaaacnaacngttcnctggaatnncgccnttttaaanccnaaaaaaaaanccnntttttccgccttttttcttttgcccccg

SEQ ID NO: 264 - DNA, 1311 bp, Homo Sapiens
  misc_feature (1)..(1): n is a, c, g, or t
  misc_feature (726)..(726): n is a, c, g, or t
  misc_feature (782)..(782): n is a, c, g, or t
  misc_feature (830)..(830): n is a, c, g, or t
  misc_feature (842)..(842): n is a, c, g, or t
  misc_feature (851)..(851): n is a, c, g, or t
  misc_feature (854)..(854): n is a, c, g, or t
  misc_feature (860)..(860): n is a, c, g, or t
  misc_feature (863)..(863): n is a, c, g, or t
  misc_feature (865)..(865): n is a, c, g, or t
  misc_feature (893)..(893): n is a, c, g, or t
  misc_feature (898)..(898): n is a, c, g, or t
  misc_feature (903)..(903): n is a, c, g, or t
  misc_feature (913)..(913): n is a, c, g, or t
  misc_feature (929)..(929): n is a, c, g, or t
  misc_feature (934)..(934): n is a, c, g, or t
  misc_feature (952)..(952): n is a, c, g, or t
  misc_feature (959)..(959): n is a, c, g, or t
  misc_feature (963)..(963): n is a, c, g, or t
  misc_feature (966)..(966): n is a, c, g, or t
  misc_feature (968)..(968): n is a, c, g, or t
  misc_feature (977)..(977): n is a, c, g, or t
  misc_feature (980)..(980): n is a, c, g, or t
  misc_feature (999)..(1000): n is a, c, g, or t
  misc_feature (1007)..(1007): n is a, c, g, or t
  misc_feature (1020)..(1020): n is a, c, g, or t
  misc_feature (1022)..(1022): n is a, c, g, or t
  misc_feature (1027)..(1028): n is a, c, g, or t
  misc_feature (1030)..(1030): n is a, c, g, or t
  misc_feature (1036)..(1036): n is a, c, g, or t
  misc_feature (1038)..(1038): n is a, c, g, or t
  misc_feature (1043)..(1043): n is a, c, g, or t
  misc_feature (1047)..(1047): n is a, c, g, or t
  misc_feature (1052)..(1052): n is a, c, g, or t
  misc_feature (1058)..(1060): n is a, c, g, or t
  misc_feature (1066)..(1066): n is a, c, g, or t
  misc_feature (1068)..(1068): n is a, c, g, or t
  misc_feature (1070)..(1070): n is a, c, g, or t
  misc_feature (1080)..(1080): n is a, c, g, or t
  misc_feature (1085)..(1085): n is a, c, g, or t
  misc_feature (1088)..(1088): n is a, c, g, or t
  misc_feature (1093)..(1093): n is a, c, g, or t
  misc_feature (1097)..(1098): n is a, c, g, or t
  misc_feature (1100)..(1100): n is a, c, g, or t
  misc_feature (1104)..(1104): n is a, c, g, or t
  misc_feature (1107)..(1108): n is a, c, g, or t
  misc_feature (1113)..(1116): n is a, c, g, or t
  misc_feature (1121)..(1121): n is a, c, g, or t
  misc_feature (1124)..(1124): n is a, c, g, or t
  misc_feature (1127)..(1127): n is a, c, g, or t
  misc_feature (1129)..(1129): n is a, c, g, or t
  misc_feature (1131)..(1131): n is a, c, g, or t
  misc_feature (1135)..(1135): n is a, c, g, or t
  misc_feature (1140)..(1140): n is a, c, g, or t
  misc_feature (1145)..(1146): n is a, c, g, or t
  misc_feature (1150)..(1150): n is a, c, g, or t
  misc_feature (1154)..(1155): n is a, c, g, or t
  misc_feature (1165)..(1166): n is a, c, g, or t
  misc_feature (1168)..(1168): n is a, c, g, or t
  misc_feature (1170)..(1170): n is a, c, g, or t
  misc_feature (1174)..(1174): n is a, c, g, or t
  misc_feature (1177)..(1178): n is a, c, g, or t
  misc_feature (1189)..(1190): n is a, c, g, or t
  misc_feature (1192)..(1192): n is a, c, g, or t
  misc_feature (1194)..(1195): n is a, c, g, or t
  misc_feature (1197)..(1200): n is a, c, g, or t
  misc_feature (1207)..(1207): n is a, c, g, or t
  misc_feature (1210)..(1218): n is a, c, g, or t
  misc_feature (1223)..(1224): n is a, c, g, or t
  misc_feature (1226)..(1234): n is a, c, g, or t
  misc_feature (1239)..(1239): n is a, c, g, or t
  misc_feature (1243)..(1248): n is a, c, g, or t
  misc_feature (1253)..(1256): n is a, c, g, or t
  misc_feature (1258)..(1273): n is a, c, g, or t
  misc_feature (1280)..(1281): n is a, c, g, or t
  misc_feature (1286)..(1287): n is a, c, g, or t
  misc_feature (1292)..(1299): n is a, c, g, or t
  misc_feature (1306)..(1311): n is a, c, g, or t
naattagagaaattactatgagaggatcgcatcaccatcaccatcacggatcctatttaggtgacactatagaatcgtcgacccacgcgtccgagcggatcgcgggctcgggctgcggggctccggctgcgggcgctgggccgcgaggcgcggagcttgggagcggagcccaggccgtgccgcgcggcgccatgaagggcaaggaggagaaggagggcggcgcacggctgggcgctggcggcggaagccccgagaagagcccgagcgcgcaggagctcaaggagcagggcaatcgtctgttcgtgggccgaaagtacccggaggcggcggcctgctacggccgcgcgatcacccggaacccgctggtggccgtgtattacaccaaccgggccttgtgctacctgaagatgcagcagcacgagcaggccctggccgactgccggcgcgccctggagctggacgggcagtctgtgaaggcgcacttcttcctggggcagtgccagctggagatggagagctatgatgaggccatcgccaatctgcagcgagcttacagcctggccaaggagcagcggctgaacttcggggacgacatccccagcgctcttcgaatcgcgaagaagaagcgctggaacagcattgaggagcggcgcatccaccaggagagcgagctgcactcctacctctccaggctcattgccgcggagcgtgagagggagctggaanagtgccagcgaaaccacgagggtgatgaggacgacagccacgtccgggcccagcangcctgcattgaggccaagcacgacaagtacatggcggacatggacgancttttttctcangtggatganaanaggaanaancnagacatccccgactacctgtgtggcaanatcanctttnaactgatgcnggaaccgtgcatcacncccantggcatcacctacaaccncaagganatcnagnancacctgcancgngtgggtcatttttaacccnngacccgnaaccccctgaccnanaaaanntnatcccnanttggntatnaagangttatnnncctttntntntaaaatggtnggtgnaanaatantganntncctnccnnactgnnnnctgtncanggnancntggnaaaanccccnncccnaaannatttattttnngncncccnacnnttcccaatttnntntnnannnnaattttnccnnnnnnnnnttttnngnnnnnnnnnccccntttnnnnnnaaaannnnannnnnnnnnnnnnnnntttcccnnttttnnaaaannnnnnnnaaaaaannnnnn

SEQ ID NO: 265 - DNA, 1327 bp, Homo Sapiens
  misc_feature (976)..(976): n is a, c, g, or t
  misc_feature (978)..(978): n is a, c, g, or t
  misc_feature (991)..(991): n is a, c, g, or t
  misc_feature (994)..(994): n is a, c, g, or t
  misc_feature (997)..(998): n is a, c, g, or t
  misc_feature (1004)..(1004): n is a, c, g, or t
  misc_feature (1035)..(1035): n is a, c, g, or t
  misc_feature (1045)..(1046): n is a, c, g, or t
  misc_feature (1050)..(1050): n is a, c, g, or t
  misc_feature (1055)..(1056): n is a, c, g, or t
  misc_feature (1071)..(1071): n is a, c, g, or t
  misc_feature (1083)..(1083): n is a, c, g, or t
  misc_feature (1106)..(1106): n is a, c, g, or t
  misc_feature (1110)..(1110): n is a, c, g, or t
  misc_feature (1115)..(1115): n is a, c, g, or t
  misc_feature (1121)..(1122): n is a, c, g, or t
  misc_feature (1128)..(1128): n is a, c, g, or t
  misc_feature (1132)..(1132): n is a, c, g, or t
  misc_feature (1134)..(1134): n is a, c, g, or t
  misc_feature (1137)..(1137): n is a, c, g, or t
  misc_feature (1140)..(1140): n is a, c, g, or t
  misc_feature (1157)..(1157): n is a, c, g, or t
  misc_feature (1161)..(1161): n is a, c, g, or t
  misc_feature (1163)..(1163): n is a, c, g, or t
  misc_feature (1166)..(1167): n is a, c, g, or t
  misc_feature (1171)..(1171): n is a, c, g, or t
  misc_feature (1180)..(1180): n is a, c, g, or t
  misc_feature (1183)..(1183): n is a, c, g, or t
  misc_feature (1185)..(1185): n is a, c, g, or t
  misc_feature (1195)..(1195): n is a, c, g, or t
  misc_feature (1205)..(1205): n is a, c, g, or t
  misc_feature (1209)..(1209): n is a, c, g, or t
  misc_feature (1211)..(1211): n is a, c, g, or t
  misc_feature (1217)..(1218): n is a, c, g, or t
  misc_feature (1232)..(1232): n is a, c, g, or t
  misc_feature (1234)..(1236): n is a, c, g, or t
  misc_feature (1245)..(1245): n is a, c, g, or t
  misc_feature (1255)..(1255): n is a, c, g, or t
  misc_feature (1258)..(1258): n is a, c, g, or t
  misc_feature (1260)..(1260): n is a, c, g, or t
  misc_feature (1262)..(1262): n is a, c, g, or t
  misc_feature (1266)..(1267): n is a, c, g, or t
  misc_feature (1274)..(1274): n is a, c, g, or t
  misc_feature (1282)..(1282): n is a, c, g, or t
  misc_feature (1303)..(1303): n is a, c, g, or t
  misc_feature (1309)..(1310): n is a, c, g, or t
  misc_feature (1313)..(1313): n is a, c, g, or t
  misc_feature (1317)..(1317): n is a, c, g, or t
  misc_feature (1324)..(1324): n is a, c, g, or t
attagagagaattactatgagaggatcgcatcaccatcaccatcacggatcctatttaggtgacactatagaatcgtcgacccacgcgtccgcggatggtgagcatattttaacagctacatgtgctcccaggttacgggttaataatggatacaaaatttggcattatactggctctatcttgcacaagtatgatgtgccatcaaatgcagaattatggcaggtttcttggcagccatttttggatggaatatttccagcaaaaacaataacttaccaagcagttccaagtgaagtacccaatgaggaacctaaagttgcaacagcttatagacccccagctttaagaaataaaccaatcaccaattccaaattgcatgaagaggaaccacctcagaatatgaaaccacaatcaggaaacgataagccattatcaaaaacagctcttaaaaatcaaaggaagcatgaagctaagaaagctgcaaagcaggaagcaagaagtgacaagagtccagatttggcacctactcctgccccacagagcacaccacgaaacactgtctctcagtcaatttctggggaccctgagatagacaaaaaaatcaagaacctaaagaagaaactgaaagcaatcgaacaactgaaagaacaagcagcaactggaaaacagctagaaaaaaatcagttggagaaaattcagaaagaaacagcccttctccaggagctggaagatttggaattgggtatttaaagattcacggaaagcaagttgatgaccagaaatcagtgcaaacacatcttctgttaaacccattggtatacacagaatattcctgtgcccacacttaatgtcaatctataattttaaccatttatccaagattctactaagtgtaaaattatttaataatgtctattaaattgatatttatatcttgcatcctaaatcatgtcaaatatgtgatataaaaaaaananacgtgaatttttnacntanncttganagattgaaagacaagtgtcatttttttttgnaaaggggganntttncctgnnaatgaaataaagacntttttaaatttnaaaaaaaaaaaaaaaaaaaaaangggnggccncccccnnaagggnggcncnatnaancttaattagctgaactnggancnccnntganaaatcccgnaangncccccaaacnccccctggantttntnccaaannccccggtgcccccngnnnttttttttngggaaaaccnacncncntggnnaattttncgggcttnggggctaaaggggaaaaaaanccgggnnaancccnggttaantcc

SEQ ID NO: 266 - DNA, 1001 bp, Homo Sapiens
  misc_feature (840)..(840): n is a, c, g, or t
  misc_feature (871)..(871): n is a, c, g, or t
  misc_feature (875)..(875): n is a, c, g, or t
  misc_feature (925)..(925): n is a, c, g, or t
  misc_feature (947)..(947): n is a, c, g, or t
  misc_feature (962)..(962): n is a, c, g, or t
  misc_feature (973)..(973): n is a, c, g, or t
  misc_feature (980)..(980): n is a, c, g, or t
  misc_feature (985)..(985): n is a, c, g, or t
  misc_feature (995)..(995): n is a, c, g, or t
agagaaattactatgagaggatcgcatcaccatcaccatcacggatcctatttaggtgacactatagaatcgtcgacccacgcgtccgctacggtggacacagcggccctgaagcagcctccggcgccccctccgccacccccgccagtgtcggcgcccgcggccgaggccgcgccccccgcctccgccgccactatcgccgcggcggcggccaccgccgtcgtagccccaacctcgacggtcgccgtggccccggtcgcgtctgccttggagaagaagacaaagagcaaggggccctacatctgcgctctgtgcgccaaggagttcaagaacggctacaatctccggaggcacgaagccatccacacgggagccaaggccggccgggtcccctcgggtgctatgaagatgccgaccatggtgcccctgagcctcctgagcgtgccccagctgagcggagccggcgggggagggggagaggcgggtgccggcggcggcgctgccgcagtggccgccggtggcgtggtgaccacgaccgcctcggggaagcgcatccggaagaaccatgcctgcgagatgtgtggcaaggccttccgcgacgtctaccacctgaaccgacacaagctgtcgcactcggacgagaagccctaccagtgcccggtgtgccagcagcgcttcaagcgcaaggaccgcatgagctaccacgtgcgctcacatgacggcgctgtgcacaagccctacaactgctcccactgtggcaagagcttctcccggccggatcacctcaacagtcacgtcagacaagtgcactcaacagaacggccctttcaaatgtgaganatgtgaggcagcttttcgccacgaaaggatngggntgcgggcgcacacagtacgaacacgaagaagaaagtgccatgttcacgtnttgtggcaagatgctgaacctnggctttatatttcgnaacaaatgaanggtgcanagccnagggttcttnacaatg

SEQ ID NO: 267 - DNA, 1021 bp, Homo Sapiens
gaaattactatgagaggatcgcatcaccatcaccatcacggatcctatttaggtgacactatagaatcgtcgacccacgcgtccgggcgccgccgggacgggcacgggcgcgcgggctccggcgggcgccggctgccttcctccgtcgctcgctgtctctcccggccgcattctcctccgctgcggggccgagctctccccagcgctcgcaggaaggaagaagggagccgaggacgccgagaagttcccgcggcagccgcggatcccggccaaggcggaggctgcggctccgacggggcaggagcgcgatccacggcgaggggcgtacggccaaagggtccgcggcgtggagcgctcggaccttccgctctcccccgggcgtgggccgggaccccatgagacgcgcccacgaggggcgcgagattcctagcttgggcggcgctaggcggagggaggtgttgcagccgccggagccagagagctgccggcaggaggcggcggcggcaagaacttgaacttggcgtcgggagcgggcgccccggacgccccccgccggggccggggcgccgagggacctgcgccgcagcgctgccccccgaatggccgcggcggcggaccgggctcccgcgccgcggccctaggcggcctctcgccatggccaagtggctaaacaagtacttcagcttgggcaacagcaagaccaagagccccccgcagccgccgcggccagactaccgcgagcagcggcgccgaggcgagcggccttcgcagcccccccaggccgtgccgcaggcctcctccgccgcctcggcgtcctgcggtccggccaccgcctcctgcttctcagcctcttcgggctcgctgcccgacgacagcggcagcaccagcgacctcatccgcgcctaccgcgcgcagaaggagcgagacttcgaggacccctacaacgggcctggctcgtcgctgcgcaaactgcgcgccatgtgccgcctggactactgcggcggcagcggggagccaggcg

SEQ ID NO: 268 - DNA, 1325 bp, Homo Sapiens
  misc_feature (650)..(650): n is a, c, g, or t
  misc_feature (652)..(652): n is a, c, g, or t
  misc_feature (657)..(658): n is a, c, g, or t
  misc_feature (668)..(668): n is a, c, g, or t
  misc_feature (674)..(674): n is a, c, g, or t
  misc_feature (687)..(687): n is a, c, g, or t
  misc_feature (689)..(690): n is a, c, g, or t
  misc_feature (713)..(713): n is a, c, g, or t
  misc_feature (798)..(798): n is a, c, g, or t
  misc_feature (839)..(839): n is a, c, g, or t
  misc_feature (863)..(863): n is a, c, g, or t
  misc_feature (866)..(866): n is a, c, g, or t
  misc_feature (869)..(869): n is a, c, g, or t
  misc_feature (882)..(882): n is a, c, g, or t
  misc_feature (903)..(903): n is a, c, g, or t
  misc_feature (937)..(937): n is a, c, g, or t
  misc_feature (939)..(939): n is a, c, g, or t
  misc_feature (952)..(952): n is a, c, g, or t
  misc_feature (969)..(969): n is a, c, g, or t
  misc_feature (979)..(979): n is a, c, g, or t
  misc_feature (986)..(986): n is a, c, g, or t
  misc_feature (999)..(999): n is a, c, g, or t
  misc_feature (1005)..(1005): n is a, c, g, or t
  misc_feature (1014)..(1014): n is a, c, g, or t
  misc_feature (1027)..(1027): n is a, c, g, or t
  misc_feature (1040)..(1040): n is a, c, g, or t
  misc_feature (1054)..(1054): n is a, c, g, or t
  misc_feature (1072)..(1072): n is a, c, g, or t
  misc_feature (1085)..(1085): n is a, c, g, or t
  misc_feature (1093)..(1093): n is a, c, g, or t
  misc_feature (1097)..(1097): n is a, c, g, or t
  misc_feature (1103)..(1103): n is a, c, g, or t
  misc_feature (1110)..(1110): n is a, c, g, or t
  misc_feature (1155)..(1155): n is a, c, g, or t
  misc_feature (1161)..(1161): n is a, c, g, or t
  misc_feature (1167)..(1167): n is a, c, g, or t
  misc_feature (1175)..(1175): n is a, c, g, or t
  misc_feature (1181)..(1181): n is a, c, g, or t
  misc_feature (1187)..(1187): n is a, c, g, or t
  misc_feature (1191)..(1192): n is a, c, g, or t
  misc_feature (1206)..(1207): n is a, c, g, or t
  misc_feature (1218)..(1218): n is a, c, g, or t
  misc_feature (1222)..(1222): n is a, c, g, or t
  misc_feature (1248)..(1248): n is a, c, g, or t
  misc_feature (1259)..(1259): n is a, c, g, or t
  misc_feature (1262)..(1262): n is a, c, g, or t
  misc_feature (1265)..(1266): n is a, c, g, or t
  misc_feature (1272)..(1272): n is a, c, g, or t
  misc_feature (1281)..(1281): n is a, c, g, or t
  misc_feature (1289)..(1289): n is a, c, g, or t
  misc_feature (1292)..(1293): n is a, c, g, or t
  misc_feature (1299)..(1299): n is a, c, g, or t
  misc_feature (1311)..(1312): n is a, c, g, or t
  misc_feature (1325)..(1325): n is a, c, g, or t
attagagaaattactatgagaggatcgcatcaccatcaccatcacggatcctatttaggtgacactatagaatcgtcgacccacgcgtccgcggaccctgcagccgcagagatgttgatgcctaagaagaaccggattgccatttatgaactcctttttaaggagggagtcatggtggccaagaaggatgtccacatgcctaagcacccggagctggcagacaagaatgtgcccaaccttcatgtcatgaaggccatgcagtctctcaagtcccgaggctacgtgaaggaacagtttgcctggagacatttctactggtaccttaccaatgagggtatccagtatctccgtgattaccttcatctgcccccggagattgtgcctgccaccctacgccgtagccgtccagagactggcaggcctcggcctaaaggtctggagggtgagcgacctgcgagactcacaagaggggaagctgacagagatacctacagacggagtgctgtgccacctggtgccgacaagaaagccgaggctggggctgggtcagcaaccgaattccagtttagaggcggatttggtcgtggacgtggtcagccacctcagtaaaattggagaggattcttttgcattgaataaacttacagccnanaaacnnaaaaaaaaanaaaaanaaaaaaaaaaaanannccccacgcgtccgctagttctanatcgcgagcggccgctccctatagtgagtcgtattaagcttaattagctgagcttggactcctgttgataaatccagtaatgacntcaaaactccatctggatttgttcaaaacgctcggttgccnccggggcgtttttttattggtganaantcnaagctagcttggncgagatttttcaggagctaanggaagctaaaatggaaaaaaaaatcccttggaananacccccgttgaanatatcccaatggcatcntaaaaaaaanttttganggccttttcagtncagttngctccatgntaccttaaaaccnaaaaccgttcaanctgggaatattacngcccttttttaaaaaacngtaaaaaaaaaanaaaccccnaaantttttntcccggnccttttatttcaaattttttgccccccctgaaaaaaaggcccctncccggnaaattnccaatggncaaatnaaaaancggnnaacctgggggaaanngggaaaaaggntttnccccctttttaacccccgttttcccnagaaaacaaanttnaanntttttncttcccctngggggggnaanncccccncaattttcgggnntttttacaaaatn

SEQ ID NO: 269 - DNA, 978 bp, Homo Sapiens
gagaggtcgcatcaccatcaccatcacggatcctatttaggtgacactatagaatcgtcgacccacgcgtccgctagttctagatcgcgagcggccgccgccgccgccgcctccgccgccctccgctccgctcggctcgggctcggctcgggcgcgggcgcggggcgcggggctgggcccgggcggagcggcggctgctccggacatgtcgggccctcgcgccggcttctaccggcaggagctgaacaagaccgtgtgggaggtgccgcagcggctgcaggggctgcgcccggtgggctccggcgcctacggctccgtctgttcggcctacgacgcccggctgcgccagaaggtggcggtgaagaagctgtcgcgccccttccagtcgctgatccacgcgcgcagaacgtaccgggagctgcggctgctcaagcacctgaagcacgagaacgtacttggtgaccaccctgatgggcgccgacctgaacaacatcgtcaagtgccaggcgctgagcgacgagcacgttcaattcctggtttaccagctgctgcgcgggctgaagtacatccactcggccgggatcatccaccgggacctgaagcccagcaacgtggctgtgaacgaggactgtgagctcaggatcctggatttcgggctggcgcgccaggcggacgaggagatgaccggctatgtggccacgcgctggtaccgggcacctgagatcatgctcaactggatgcattacaaccaaacagtggatatctggtccgtgggctgcatcatggctgagctgctccagggcaaggccctcttcccgggaagcgactacattgaccagctgaagcgcatcatggaagtggtgggcacacccagccctgaggttctggcaaaaatctcctcggaacacgcccggacatatatccagtccctgccccccatgccccagaaaggacctgagcagcatctttccgtggagc

SEQ ID NO: 270 - DNA, 933 bp, Homo Sapiens
ggtcgcatcaccatcaccatcacggatcctatttaggtgacactatagaatcgtcgacccacgcgtccgcccacgcgtccgcccacgcgtccgatttggaacattatctggacagtattgaaaaccttccctttgaattacagagaaactttcagctcatgagggacctagaccaaagaacagaggacctgaaggctgaaattgacaagttggccactgagtatatgagtagtgcccgcagcctgagctccgaggaaaaattggcccttctcaaacagatccaggaagcctatggcaagtgcaaggaatttggtgacgacaaggtgcagcttgccatgcagacctatgagatggtggacaaacacattcggcggctggacacagacctggcccgttttgaggctgatctcaaggagaaacagattgagtcaagtgactatgacagctcttccagcaaaggcaaaaagagccggactcaaaaggagaagaaagctgctcgtgctcgttccaaagggaaaaactcggatgaagaagcccccaagactgcccagaagaagttaaagctcgtgcgcacaagtcctgagtatgggatgccctcagtgacctttggcagtgtccacccctctgatgtgttggatatgcctgtggatcccaacgaacccacctattgcctttgtcaccaggtctcctatggagagatgattggctgtgacaaccctgattgttccattgagtggttccattttgcctgtgtggggctgacaaccaagcctcgggggaaatggttttgcccacgctgctcccaagaacggaagaagaaatagataaggggccttggattccaacacagtttcttccacatcccctgacttggggctagtgggcagaggaatgcctgtgctggggccaggggttcagggaggagtggatggc

SEQ ID NO: 271 - DNA, 1437 bp, Homo Sapiens
  misc_feature (2)..(2): n is a, c, g, or t
  misc_feature (460)..(460): n is a, c, g, or t
  misc_feature (580)..(581): n is a, c, g, or t
  misc_feature (589)..(589): n is a, c, g, or t
  misc_feature (613)..(613): n is a, c, g, or t
  misc_feature (619)..(620): n is a, c, g, or t
  misc_feature (643)..(643): n is a, c, g, or t
  misc_feature (650)..(650): n is a, c, g, or t
  misc_feature (666)..(667): n is a, c, g, or t
  misc_feature (686)..(686): n is a, c, g, or t
  misc_feature (690)..(690): n is a, c, g, or t
  misc_feature (692)..(692): n is a, c, g, or t
  misc_feature (700)..(701): n is a, c, g, or t
  misc_feature (704)..(704): n is a, c, g, or t
  misc_feature (708)..(708): n is a, c, g, or t
  misc_feature (711)..(711): n is a, c, g, or t
  misc_feature (724)..(724): n is a, c, g, or t
  misc_feature (727)..(727): n is a, c, g, or t
  misc_feature (734)..(734): n is a, c, g, or t
  misc_feature (743)..(743): n is a, c, g, or t
  misc_feature (745)..(746): n is a, c, g, or t
  misc_feature (751)..(751): n is a, c, g, or t
  misc_feature (754)..(754): n is a, c, g, or t
  misc_feature (756)..(756): n is a, c, g, or t
  misc_feature (761)..(761): n is a, c, g, or t
  misc_feature (764)..(764): n is a, c, g, or t
  misc_feature (770)..(770): n is a, c, g, or t
  misc_feature (776)..(776): n is a, c, g, or t
  misc_feature (779)..(779): n is a, c, g, or t
  misc_feature (781)..(781): n is a, c, g, or t
  misc_feature (785)..(785): n is a, c, g, or t
  misc_feature (790)..(792): n is a, c, g, or t
  misc_feature (796)..(796): n is a, c, g, or t
  misc_feature (799)..(800): n is a, c, g, or t
  misc_feature (802)..(802): n is a, c, g, or t
  misc_feature (806)..(806): n is a, c, g, or t
  misc_feature (808)..(808): n is a, c, g, or t
  misc_feature (813)..(813): n is a, c, g, or t
  misc_feature (818)..(818): n is a, c, g, or t
  misc_feature (822)..(822): n is a, c, g, or t
  misc_feature (837)..(838): n is a, c, g, or t
  misc_feature (843)..(843): n is a, c, g, or t
  misc_feature (846)..(846): n is a, c, g, or t
  misc_feature (854)..(854): n is a, c, g, or t
  misc_feature (857)..(857): n is a, c, g, or t
  misc_feature (866)..(866): n is a, c, g, or t
  misc_feature (874)..(874): n is a, c, g, or t
  misc_feature (882)..(882): n is a, c, g, or t
  misc_feature (885)..(885): n is a, c, g, or t
  misc_feature (887)..(887): n is a, c, g, or t
  misc_feature (891)..(891): n is a, c, g, or t
  misc_feature (895)..(895): n is a, c, g, or t
  misc_feature (897)..(897): n is a, c, g, or t
  misc_feature (903)..(903): n is a, c, g, or t
  misc_feature (906)..(906): n is a, c, g, or t
  misc_feature (910)..(910): n is a, c, g, or t
  misc_feature (916)..(916): n is a, c, g, or t
  misc_feature (919)..(920): n is a, c, g, or t
  misc_feature (924)..(925): n is a, c, g, or t
  misc_feature (932)..(933): n is a, c, g, or t
  misc_feature (935)..(935): n is a, c, g, or t
  misc_feature (941)..(943): n is a, c, g, or t
  misc_feature (945)..(945): n is a, c, g, or t
  misc_feature (950)..(950): n is a, c, g, or t
  misc_feature (954)..(955): n is a, c, g, or t
  misc_feature (957)..(957): n is a, c, g, or t
  misc_feature (970)..(970): n is a, c, g, or t
  misc_feature (975)..(976): n is a, c, g, or t
  misc_feature (979)..(979): n is a, c, g, or t
  misc_feature (988)..(988): n is a, c, g, or t
  misc_feature (994)..(994): n is a, c, g, or t
  misc_feature (1005)..(1005): n is a, c, g, or t
  misc_feature (1009)..(1009): n is a, c, g, or t
  misc_feature (1013)..(1013): n is a, c, g, or t
  misc_feature (1019)..(1022): n is a, c, g, or t
  misc_feature (1025)..(1025): n is a, c, g, or t
  misc_feature (1032)..(1032): n is a, c, g, or t
  misc_feature (1034)..(1035): n is a, c, g, or t
  misc_feature (1050)..(1051): n is a, c, g, or t
  misc_feature (1057)..(1057): n is a, c, g, or t
  misc_feature (1059)..(1059): n is a, c, g, or t
  misc_feature (1061)..(1061): n is a, c, g, or t
  misc_feature (1068)..(1069): n is a, c, g, or t
  misc_feature (1074)..(1075): n is a, c, g, or t
  misc_feature (1078)..(1078): n is a, c, g, or t
  misc_feature (1080)..(1080): n is a, c, g, or t
  misc_feature (1082)..(1082): n is a, c, g, or t
  misc_feature (1089)..(1090): n is a, c, g, or t
  misc_feature (1093)..(1093): n is a, c, g, or t
  misc_feature (1096)..(1097): n is a, c, g, or t
  misc_feature (1099)..(1102): n is a, c, g, or t
  misc_feature (1111)..(1111): n is a, c, g, or t
  misc_feature (1113)..(1113): n is a, c, g, or t
  misc_feature (1118)..(1120): n is a, c, g, or t
  misc_feature (1125)..(1125): n is a, c, g, or t
  misc_feature (1133)..(1137): n is a, c, g, or t
  misc_feature (1143)..(1144): n is a, c, g, or t
  misc_feature (1151)..(1152): n is a, c, g, or t
  misc_feature (1156)..(1156): n is a, c, g, or t
  misc_feature (1159)..(1159): n is a, c, g, or t
  misc_feature (1161)..(1161): n is a, c, g, or t
  misc_feature (1163)..(1165): n is a, c, g, or t
  misc_feature (1171)..(1171): n is a, c, g, or t
  misc_feature (1174)..(1174): n is a, c, g, or t
  misc_feature (1178)..(1179): n is a, c, g, or t
  misc_feature (1183)..(1183): n is a, c, g, or t
  misc_feature (1188)..(1188): n is a, c, g, or t
  misc_feature (1191)..(1191): n is a, c, g, or t
  misc_feature (1195)..(1195): n is a, c, g, or t
  misc_feature (1198)..(1198): n is a, c, g, or t
  misc_feature (1204)..(1204): n is a, c, g, or t
  misc_feature (1207)..(1209): n is a, c, g, or t
  misc_feature (1227)..(1227): n is a, c, g, or t
  misc_feature (1231)..(1231): n is a, c, g, or t
  misc_feature (1244)..(1244): n is a, c, g, or t
  misc_feature (1248)..(1248): n is a, c, g, or t
  misc_feature (1252)..(1253): n is a, c, g, or t
  misc_feature (1255)..(1255): n is a, c, g, or t
  misc_feature (1257)..(1259): n is a, c, g, or t
  misc_feature (1261)..(1261): n is a, c, g, or t
  misc_feature (1269)..(1271): n is a, c, g, or t
  misc_feature (1274)..(1274): n is a, c, g, or t
  misc_feature (1282)..(1282): n is a, c, g, or t
  misc_feature (1287)..(1287): n is a, c, g, or t
  misc_feature (1290)..(1291): n is a, c, g, or t
  misc_feature (1298)..(1298): n is a, c, g, or t
  misc_feature (1303)..(1303): n is a, c, g, or t
  misc_feature (1306)..(1306): n is a, c, g, or t
  misc_feature (1312)..(1312): n is a, c, g, or t
  misc_feature (1316)..(1317): n is a, c, g, or t
  misc_feature (1321)..(1321): n is a, c, g, or t
  misc_feature (1328)..(1329): n is a, c, g, or t
  misc_feature (1331)..(1331): n is a, c, g, or t
  misc_feature (1333)..(1333): n is a, c, g, or t
  misc_feature (1340)..(1340): n is a, c, g, or t
  misc_feature (1347)..(1347): n is a, c, g, or t
  misc_feature (1349)..(1349): n is a, c, g, or t
  misc_feature (1351)..(1351): n is a, c, g, or t
  misc_feature (1353)..(1353): n is a, c, g, or t
  misc_feature (1359)..(1359): n is a, c, g, or t
  misc_feature (1362)..(1362): n is a, c, g, or t
  misc_feature (1366)..(1366): n is a, c, g, or t
  misc_feature (1371)..(1371): n is a, c, g, or t
  misc_feature (1373)..(1373): n is a, c, g, or t
  misc_feature (1375)..(1375): n is a, c, g, or t
  misc_feature (1383)..(1384): n is a, c, g, or t
  misc_feature (1388)..(1390): n is a, c, g, or t
  misc_feature (1393)..(1396): n is a, c, g, or t
  misc_feature (1403)..(1404): n is a, c, g, or t
  misc_feature (1406)..(1406): n is a, c, g, or t
  misc_feature (1408)..(1408): n is a, c, g, or t
  misc_feature (1410)..(1412): n is a, c, g, or t
  misc_feature (1417)..(1417): n is a, c, g, or t
  misc_feature (1424)..(1424): n is a, c, g, or t
  misc_feature (1427)..(1427): n is a, c, g, or t
  misc_feature (1430)..(1432): n is a, c, g, or t
  misc_feature (1434)..(1434): n is a, c, g, or t
  misc_feature (1437)..(1437): n is a, c, g, or t
anatagagaaattactatgagaggatcgcatcaccatcaccatcacggatcctatttaggtgacactatagaatcgtcgacccacgcgtccggccggcccggcggcgggtcacgtgagcggaaaatggcggccccggcaggcggcggaggctccgcggtgtcggtgctggccccgaacggccggcgccacacggtgaaggtgacgccgagcaccgtgctgcttcaggttctggaggacacgtgccggcggcaggacttcaacccctgtgaatatgatctgaagtttcagaggagcgtgctcgacctttctctccagtggagatttgccaacctgcccaacaatgccaagctggagatggtgcccgcttcccggagccgtgaggggcctgagaacatggttcgcatcgctttgcagctggacgatggctcgaggttgcaggactctttctgttcaggccanaccctctgggagcttctcagccattttccacagatcagggagtgcctgcagcaccccggcggggccaccccagtctgcgtgtacacgagggatgaggtgacgggtgaagctgccctgcgnngcacgacnctgcagtcgctgggcctgaccggnggcagnnccaccatcaagtttgtcatgaantgctacnaccccgtgggcaaganncccaggaagcctgggctcntcancntcggttgnncangcanccntcagtgcttccanttncccttgnaatctgggnanntcaantcncngatanttnaatccntcctgnaanantccnaacannnttanggnncntggntnctaanccaantttnaagaaaaataaaaanncaatngtnacccctcnacntgccccccntttgtttncttttatnagntngggngaananaaaatnggngggnccctcntanngacnntaaatgnntntaacannntntttantttnnantttccaaaatccnttttnntancctttaaancccctnccaatcataanaaanttcnatttannnncanttatatncnnaaccagaataaaaanncaaaantntnatttatnnttccnnacntntnaaaatannttnatnnannnnctataaatnanatccnnnaaacnataaactnnnnnatctannacactcnnttanaananannnttcaanctntcannaaanttttnttnatanatntttttnatnnnatatatttaatttataanaatntttcccacttatntttntaanntncnnnanaaaatccnnntanctaaatanttatnacnntaaaatnaaatnaanatattnaaanntatnattgatnntncntaaacancatatantnantnatcccnatntttnataancntnttaatatnnatannncannnnataaacnnantntnnntaatntactacntanaannntnaan

SEQ ID NO: 272 - DNA, 1337 bp, Homo Sapiens
  misc_feature (717)..(717): n is a, c, g, or t
  misc_feature (738)..(738): n is a, c, g, or t
  misc_feature (786)..(786): n is a, c, g, or t
  misc_feature (833)..(833): n is a, c, g, or t
  misc_feature (835)..(835): n is a, c, g, or t
  misc_feature (859)..(859): n is a, c, g, or t
  misc_feature (861)..(861): n is a, c, g, or t
  misc_feature (868)..(868): n is a, c, g, or t
  misc_feature (875)..(875): n is a, c, g, or t
  misc_feature (881)..(881): n is a, c, g, or t
  misc_feature (908)..(908): n is a, c, g, or t
  misc_feature (949)..(949): n is a, c, g, or t
  misc_feature (958)..(958): n is a, c, g, or t
  misc_feature (960)..(960): n is a, c, g, or t
  misc_feature (971)..(971): n is a, c, g, or t
  misc_feature (985)..(987): n is a, c, g, or t
  misc_feature (991)..(991): n is a, c, g, or t
  misc_feature (997)..(997): n is a, c, g, or t
  misc_feature (1003)..(1003): n is a, c, g, or t
  misc_feature (1005)..(1005): n is a, c, g, or t
  misc_feature (1009)..(1010): n is a, c, g, or t
  misc_feature (1013)..(1013): n is a, c, g, or t
  misc_feature (1016)..(1016): n is a, c, g, or t
  misc_feature (1027)..(1027): n is a, c, g, or t
  misc_feature (1029)..(1029): n is a, c, g, or t
  misc_feature (1041)..(1041): n is a, c, g, or t
  misc_feature (1058)..(1058): n is a, c, g, or t
  misc_feature (1079)..(1079): n is a, c, g, or t
  misc_feature (1082)..(1082): n is a, c, g, or t
  misc_feature (1085)..(1085): n is a, c, g, or t
  misc_feature (1099)..(1101): n is a, c, g, or t
  misc_feature (1106)..(1106): n is a, c, g, or t
  misc_feature (1113)..(1113): n is a, c, g, or t
  misc_feature (1118)..(1118): n is a, c, g, or t
  misc_feature (1121)..(1121): n is a, c, g, or t
  misc_feature (1128)..(1128): n is a, c, g, or t
  misc_feature (1138)..(1141): n is a, c, g, or t
  misc_feature (1143)..(1148): n is a, c, g, or t
  misc_feature (1150)..(1150): n is a, c, g, or t
  misc_feature (1154)..(1154): n is a, c, g, or t
  misc_feature (1157)..(1157): n is a, c, g, or t
  misc_feature (1164)..(1165): n is a, c, g, or t
  misc_feature (1176)..(1176): n is a, c, g, or t
  misc_feature (1190)..(1190): n is a, c, g, or t
  misc_feature (1200)..(1201): n is a, c, g, or t
  misc_feature (1204)..(1204): n is a, c, g, or t
  misc_feature (1206)..(1206): n is a, c, g, or t
  misc_feature (1210)..(1210): n is a, c, g, or t
  misc_feature (1213)..(1215): n is a, c, g, or t
  misc_feature (1219)..(1219): n is a, c, g, or t
  misc_feature (1223)..(1223): n is a, c, g, or t
  misc_feature (1230)..(1231): n is a, c, g, or t
  misc_feature (1233)..(1233): n is a, c, g, or t
  misc_feature (1238)..(1238): n is a, c, g, or t
  misc_feature (1243)..(1243): n is a, c, g, or t
  misc_feature (1247)..(1248): n is a, c, g, or t
  misc_feature (1252)..(1252): n is a, c, g, or t
  misc_feature (1255)..(1258): n is a, c, g, or t
  misc_feature (1262)..(1264): n is a, c, g, or t
  misc_feature (1271)..(1271): n is a, c, g, or t
  misc_feature (1273)..(1277): n is a, c, g, or t
  misc_feature (1279)..(1282): n is a, c, g, or t
  misc_feature (1290)..(1294): n is a, c, g, or t
  misc_feature (1302)..(1304): n is a, c, g, or t
  misc_feature (1306)..(1318): n is a, c, g, or t
  misc_feature (1320)..(1320): n is a, c, g, or t
  misc_feature (1324)..(1324): n is a, c, g, or t
  misc_feature (1328)..(1329): n is a, c, g, or t
agagaaattactatgagaggatcgcatcaccatcaccatcacggatcctatttaggtgacactatagaatcgtcgacccacgcgtccgccgggcccgagcggatcgcgggctcgggctgcggggctccggctgcgggcgctgggccgcgaggcgcggagcttgggagcggagcccaggccgtgccgcgcggcgccatgaagggcaaggaggagaaggagggcggcgcacggctgggcgctggcggcggaagccccgagaagagcccgagcgcgcaggagctcaaggagcagggcaatcgtctgttcgtgggccgaaagtacccggaggcggcggcctgctacggccgcgcgatcacccggaacccgctggtggccgtgtattacaccaaccgggccttgtgctacctgaagatgcagcagcacgagcaggccctggccgactgccggcgcgccctggagctggacgggcagtctgtgaaggcgcacttcttcctggggcagtgccagctggagatggagagctatgatgaggccatcgccaatctgcagcgagcttacagcctggccaaggagcagcggctgaacttcggggacgacatccccagcgctcttcgaatcgcgaagaagaagcgctggaacagcattgaggagcggcgcatccaccaggagagcgagctgcactcctacctctccaggctcattgccgcggagcgtganagggagctggaaaagtgccancgaaaccacgagggtgatgaggacgacagccacgtccgggcccagcangcctgcattgaggccaagcacgacaagtacatggcggaacatggacnancttttttctcaggtggatgaaaanangaaaaancgagacntccccnactacctgtgtggcaaaatcaactttnaactgatgcgggaacccgtgcatcacgcccaattggcattnccttacaancncaaggacatcnaggaacaacctgcnnngtgngggttnattttnancccnnganccngaaaccccctnanccaagaaaaaantttatccccaatttggntattaaagaagtttatttganccnttnttttctaaaatggnnnggggngaaaaanaattnaanttccctncccaacttgnnnncnnnnnncnaggnaanccttggnnaaaaacccccngccccaaaaaaaantttaattttnnggncncccnaannntttncccnaattttnntntttgnaattngaanntttnccnnnnaaannnttttttngnnnnnannnncccttttnnnnnaaaaaaannnannnnnnnnnnnnnantttncccnnttttaaaa

SEQ ID NO: 273 - DNA, 447 bp, Homo Sapiens
aattactatgagaggatcgcatcaccatcaccatcacggatcctatttaggtgacactatagaatcgtcgacccacgcgtccgatgaaataagcgagaagatccctcttctcccccctctctctcttgccccctccccccctcccctcccctctccccttgactcctctccgaggcaccatgctgacccgcctgttcagcgagcccggccttctctcggacgtgcccaagttcgccagctggggcgacggcgaagacgacgagccgaggagcgacaagggcgacgcgccgccaccgccaccgcctgcgcccgggccaggggctccggggccagcccgggcggccaagccagtccctctccgtggagaagaggggacggaggccacgttggccgaggtcaaggaggaaggcgagctggggggagaggaggaggaggaagaggaggagg

SEQ ID NO: 274 - DNA, 735 bp, Homo Sapiens
gaggtcgcatcaccatcaccatcacggatcctatttaggtgacactatagaatcgtcgacccacgcgtccgcccacgcgtccgcccacgcgtccgcccacgcgtccgcccacgcgtccgcggacgcgtgggcgcagtaccgcagccaccctgtggacgtgtatgccggcttcctcatcggggcgggcatcgctgcctacctggcctgccacgcggtgggcaacttccaggccccacctgcagagaagcccgcggccccggcccccgccaaggacgcgctgcgggccctgacgcagcggggccacgactcggtttatcagcagaataagtcggtgagcaccgacgagctggggcccccagggcggctggagggcgcgccccggcccgtggcccgcgagaagacctcgctgggcagcctgaagcgcgccagcgtggacgtggacctgctggccccgcgcagccccatggccaaggagaacatggtgaccttcagccacacgctgcccagggccagcgcgccctcgctggacgaccccgcgcgccgccacatgaccatccacgtgccgctggacgcctcgcgctccaagcagctcatcagcgagtggaagcagaagagcctggagggccgcggcctggggctgcccgacgacgccagccccgggcacctgcgcgcgcccgccgaacccatggcggaggaggaggaagaggaggaggacgaagaggaagaggaggagga

SEQ ID NO: 275 - DNA, 1200 bp, Homo Sapiens
  misc_feature (765)..(765): n is a, c, g, or t
  misc_feature (767)..(767): n is a, c, g, or t
  misc_feature (803)..(803): n is a, c, g, or t
  misc_feature (831)..(831): n is a, c, g, or t
  misc_feature (850)..(850): n is a, c, g, or t
  misc_feature (876)..(876): n is a, c, g, or t
  misc_feature (880)..(881): n is a, c, g, or t
  misc_feature (883)..(883): n is a, c, g, or t
  misc_feature (888)..(888): n is a, c, g, or t
  misc_feature (893)..(893): n is a, c, g, or t
  misc_feature (898)..(898): n is a, c, g, or t
  misc_feature (901)..(901): n is a, c, g, or t
  misc_feature (928)..(928): n is a, c, g, or t
  misc_feature (931)..(932): n is a, c, g, or t
  misc_feature (937)..(937): n is a, c, g, or t
  misc_feature (940)..(940): n is a, c, g, or t
  misc_feature (951)..(951): n is a, c, g, or t
  misc_feature (987)..(987): n is a, c, g, or t
  misc_feature (991)..(991): n is a, c, g, or t
  misc_feature (994)..(994): n is a, c, g, or t
  misc_feature (996)..(996): n is a, c, g, or t
  misc_feature (1001)..(1001): n is a, c, g, or t
  misc_feature (1006)..(1006): n is a, c, g, or t
  misc_feature (1019)..(1019): n is a, c, g, or t
  misc_feature (1025)..(1025): n is a, c, g, or t
  misc_feature (1031)..(1031): n is a, c, g, or t
  misc_feature (1043)..(1043): n is a, c, g, or t
  misc_feature (1047)..(1050): n is a, c, g, or t
  misc_feature (1057)..(1057): n is a, c, g, or t
  misc_feature (1059)..(1060): n is a, c, g, or t
  misc_feature (1068)..(1068): n is a, c, g, or t
  misc_feature (1074)..(1074): n is a, c, g, or t
  misc_feature (1082)..(1083): n is a, c, g, or t
  misc_feature (1087)..(1087): n is a, c, g, or t
  misc_feature (1090)..(1090): n is a, c, g, or t
  misc_feature (1097)..(1097): n is a, c, g, or t
  misc_feature (1103)..(1103): n is a, c, g, or t
  misc_feature (1105)..(1105): n is a, c, g, or t
  misc_feature (1110)..(1110): n is a, c, g, or t
  misc_feature (1120)..(1120): n is a, c, g, or t
  misc_feature (1126)..(1126): n is a, c, g, or t
  misc_feature (1143)..(1143): n is a, c, g, or t
  misc_feature (1145)..(1145): n is a, c, g, or t
  misc_feature (1159)..(1159): n is a, c, g, or t
  misc_feature (1162)..(1162): n is a, c, g, or t
  misc_feature (1164)..(1164): n is a, c, g, or t
  misc_feature (1177)..(1177): n is a, c, g, or t
  misc_feature (1180)..(1180): n is a, c, g, or t
  misc_feature (1182)..(1184): n is a, c, g, or t
  misc_feature (1186)..(1186): n is a, c, g, or t
tagagagattactatgagaggatcgcatcaccatcaccatcacggatcctatttaggtgacactatagaatcgtcgacccacgcgtccggtcttggagccccactgggtgcaggagctgctggctgtccctgtggacccgccatccaccgtcctgcccacgccgcctcagcctgccacctcccacctagaggagaccatgggccctgccccacccactccaggatgttagggtcccctcagccaaaaaggcagctgcctgtggctcctgtaccaaccgcccagccacgctccatcgccgcccaaagggaggtgccaaggccaggaacccaagccaccccggctcccctcgcctgcccaggggccgtggtgactcacgggcagggaggcgacatcaggctggttctgccactgagcccctgaggaatctgaccctccccaaaagaagcagtgaaatggaccaaaggacttaagaatttggggggaagtgagggaaaaacgttaggtgctaaccacctgcccagaagagtggatctcacagcccaggaacattcccaagcaggaaaaccgtccgtccgaggaacgtccatcctggctctctgcggctggtgggaaaacacaccctgccctgaggggctgtccaggccttctcccccacaccctcaggccgagatccgtgagagacccactttgctccaacaacttgaaacaagtcactttaccctccttaggacccattttgggggggaaaaaccaacacattccananctttccaagtcctttgaacttcaggttcacattcangggatcacacagttttgcctgttctcanggcacagcaactgccaatncccgctgaaaaaggcctcccttgggnaaannanagggntgcanggtgnacngcatttccctgaaaggcagcccctttnttnngaaancanctgttccaagncttcgaaaaaggcctgggtaatccccgtgggtgggntggnaantnaaggncctgntttatgggaaccnggaaantaattnaaaaccccaaancaannnngggggcnanngggggggncccaanccccccannaggnaancccttgnaaaaangnttaanccccccaaanttcaangaaaggaaaaaaatggnantggggcctggaaanttncnaaaaagaaatttnccncnnnantgaaaaaaccttgg

SEQ ID NO: 276 - DNA, 1354 bp, Homo Sapiens
  misc_feature (1)..(1): n is a, c, g, or t
  misc_feature (813)..(813): n is a, c, g, or t
  misc_feature (856)..(856): n is a, c, g, or t
  misc_feature (919)..(919): n is a, c, g, or t
  misc_feature (926)..(926): n is a, c, g, or t
  misc_feature (938)..(938): n is a, c, g, or t
  misc_feature (951)..(951): n is a, c, g, or t
  misc_feature (958)..(958): n is a, c, g, or t
  misc_feature (966)..(966): n is a, c, g, or t
  misc_feature (981)..(981): n is a, c, g, or t
  misc_feature (988)..(988): n is a, c, g, or t
  misc_feature (996)..(996): n is a, c, g, or t
  misc_feature (1007)..(1007): n is a, c, g, or t
  misc_feature (1009)..(1009): n is a, c, g, or t
  misc_feature (1012)..(1012): n is a, c, g, or t
  misc_feature (1014)..(1014): n is a, c, g, or t
  misc_feature (1019)..(1020): n is a, c, g, or t
  misc_feature (1036)..(1036): n is a, c, g, or t
  misc_feature (1042)..(1042): n is a, c, g, or t
  misc_feature (1045)..(1045): n is a, c, g, or t
  misc_feature (1047)..(1047): n is a, c, g, or t
  misc_feature (1052)..(1053): n is a, c, g, or t
  misc_feature (1061)..(1062): n is a, c, g, or t
  misc_feature (1069)..(1069): n is a, c, g, or t
  misc_feature (1071)..(1072): n is a, c, g, or t
  misc_feature (1076)..(1076): n is a, c, g, or t
  misc_feature (1080)..(1081): n is a, c, g, or t
  misc_feature (1085)..(1086): n is a, c, g, or t
  misc_feature (1088)..(1089): n is a, c, g, or t
  misc_feature (1091)..(1092): n is a, c, g, or t
  misc_feature (1095)..(1096): n is a, c, g, or t
  misc_feature (1099)..(1100): n is a, c, g, or t
  misc_feature (1102)..(1106): n is a, c, g, or t
  misc_feature (1109)..(1109): n is a, c, g, or t
  misc_feature (1111)..(1111): n is a, c, g, or t
  misc_feature (1113)..(1114): n is a, c, g, or t
  misc_feature (1118)..(1118): n is a, c, g, or t
  misc_feature (1124)..(1125): n is a, c, g, or t
  misc_feature (1128)..(1131): n is a, c, g, or t
  misc_feature (1135)..(1138): n is a, c, g, or t
  misc_feature (1144)..(1146): n is a, c, g, or t
  misc_feature (1148)..(1149): n is a, c, g, or t
  misc_feature (1153)..(1153): n is a, c, g, or t
  misc_feature (1155)..(1155): n is a, c, g, or t
  misc_feature (1157)..(1157): n is a, c, g, or t
  misc_feature (1159)..(1159): n is a, c, g, or t
  misc_feature (1162)..(1162): n is a, c, g, or t
  misc_feature (1166)..(1171): n is a, c, g, or t
  misc_feature (1174)..(1176): n is a, c, g, or t
  misc_feature (1181)..(1181): n is a, c, g, or t
  misc_feature (1183)..(1185): n is a, c, g, or t
  misc_feature (1188)..(1191): n is a, c, g, or t
  misc_feature (1195)..(1196): n is a, c, g, or t
  misc_feature (1198)..(1198): n is a, c, g, or t
  misc_feature (1205)..(1210): n is a, c, g, or t
  misc_feature (1212)..(1212): n is a, c, g, or t
  misc_feature (1214)..(1215): n is a, c, g, or t
  misc_feature (1220)..(1220): n is a, c, g, or t
  misc_feature (1222)..(1222): n is a, c, g, or t
  misc_feature (1224)..(1224): n is a, c, g, or t
  misc_feature (1226)..(1226): n is a, c, g, or t
  misc_feature (1231)..(1237): n is a, c, g, or t
  misc_feature (1239)..(1239): n is a, c, g, or t
  misc_feature (1241)..(1241): n is a, c, g, or t
  misc_feature (1243)..(1243): n is a, c, g, or t
  misc_feature (1245)..(1246): n is a, c, g, or t
  misc_feature (1250)..(1256): n is a, c, g, or t
  misc_feature (1259)..(1260): n is a, c, g, or t
  misc_feature (1265)..(1265): n is a, c, g, or t
  misc_feature (1267)..(1270): n is a, c, g, or t
  misc_feature (1274)..(1282): n is a, c, g, or t
  misc_feature (1284)..(1284): n is a, c, g, or t
  misc_feature (1290)..(1294): n is a, c, g, or t
  misc_feature (1296)..(1302): n is a, c, g, or t
  misc_feature (1306)..(1306): n is a, c, g, or t
  misc_feature (1308)..(1324): n is a, c, g, or t
  misc_feature (1326)..(1326): n is a, c, g, or t
  misc_feature (1328)..(1330): n is a, c, g, or t
  misc_feature (1332)..(1345): n is a, c, g, or t
  misc_feature (1348)..(1354): n is a, c, g, or t
naattactatgagaggatcgcatcaccatcaccatcacggatcctatttaggtgacactatagaatcgtcgacccacgcgtccggcggcggccgagcctggaaacctggccggcgtcaggcacatcatcctggtcctctcaggaaaggggggcgttgggaaaagcaccatctccacggagctggccctggcactgcgccatgcaggcaagaaggtgggaatcctggatgtggacctgtgtggccccagtataccccgcatgctcggggcgcagggcagggctgtgcaccagtgcgaccgcggctgggcacccgtcttcctggaccgggagcagagcatctcgctcatgtctgtgggcttcctgctggagaagccggacgaggccgtggtgtggagaggccccaagaaaaacgcgctgataaagcagtttgtgtccgacgtggcctggggggagctggactacctggtggtggacacgcccccggggacctccgatgagcacatggccaccatagaagccctgcgtccctaccagcccctgggggccctcgtggtcaccacgccccaggcggtgtccgtgggggacgtgaggcgcgagctgaccttctgtaggaagacgggcttgcgggtgatgggaatcgtggagaatatgagcggcttcacctgcccacactgcacggagtgcaccagcgtcttctccaggggcggcggaaaggagctggcccagctcgccggggtgcccttcttaagctccgtgcccctggaccctgcgctcatgaggaccctggaggaaggccacgacttcatccaggantttccccgggaagcccccgccttcgctgcactcacctccatancccaaaaaaattctggacgcgacgccccgcgtgcctcccctgactaaggccaccttgcaaccncttttcnagggccaccaanggctctgctccanccttttnaaaaaaanaaaggcctgggctcngtttccnggccctgnagggcaggccnancancnttcannggaaaaatttttcccnaacaanccnancccannattttgtnncaccaananntttncctnnttgnntnnannccnnggnntnnnnnctntnanntttnaaaaannggnnnnctgnnnntttccnnncnngttncnancnttncccnnnnnnccnnntttcnannnttnnnnaaannanaattttnnnnnntnannaaccngncntnaaccnnnnnnntntntntnntttnnnnnnnaannccccnannnnaaannnnnnnnntntttttnnnnnannnnnnnatanannnnnnnnnnnnnnnnnanannnannnnnnnnnnnnnnaannnnnnn

SEQ ID NO: 277 - DNA, 1349 bp, Homo Sapiens
  misc_feature (820)..(820): n is a, c, g, or t
  misc_feature (903)..(903): n is a, c, g, or t
  misc_feature (918)..(918): n is a, c, g, or t
  misc_feature (927)..(927): n is a, c, g, or t
  misc_feature (943)..(943): n is a, c, g, or t
  misc_feature (968)..(968): n is a, c, g, or t
  misc_feature (970)..(970): n is a, c, g, or t
  misc_feature (974)..(974): n is a, c, g, or t
  misc_feature (981)..(981): n is a, c, g, or t
  misc_feature (983)..(983): n is a, c, g, or t
  misc_feature (1001)..(1001): n is a, c, g, or t
  misc_feature (1014)..(1014): n is a, c, g, or t
  misc_feature (1029)..(1029): n is a, c, g, or t
  misc_feature (1031)..(1031): n is a, c, g, or t
  misc_feature (1034)..(1034): n is a, c, g, or t
  misc_feature (1043)..(1043): n is a, c, g, or t
  misc_feature (1048)..(1048): n is a, c, g, or t
  misc_feature (1053)..(1053): n is a, c, g, or t
  misc_feature (1064)..(1065): n is a, c, g, or t
  misc_feature (1076)..(1076): n is a, c, g, or t
  misc_feature (1081)..(1081): n is a, c, g, or t
  misc_feature (1086)..(1088): n is a, c, g, or t
  misc_feature (1090)..(1090): n is a, c, g, or t
  misc_feature (1092)..(1092): n is a, c, g, or t
  misc_feature (1095)..(1096): n is a, c, g, or t
  misc_feature (1102)..(1103): n is a, c, g, or t
  misc_feature (1107)..(1108): n is a, c, g, or t
  misc_feature (1111)..(1111): n is a, c, g, or t
  misc_feature (1115)..(1115): n is a, c, g, or t
  misc_feature (1124)..(1124): n is a, c, g, or t
  misc_feature (1132)..(1132): n is a, c, g, or t
  misc_feature (1136)..(1136): n is a, c, g, or t
  misc_feature (1140)..(1140): n is a, c, g, or t
  misc_feature (1148)..(1148): n is a, c, g, or t
  misc_feature (1156)..(1156): n is a, c, g, or t
  misc_feature (1160)..(1162): n is a, c, g, or t
  misc_feature (1165)..(1168): n is a, c, g, or t
  misc_feature (1182)..(1182): n is a, c, g, or t
  misc_feature (1185)..(1185): n is a, c, g, or t
  misc_feature (1189)..(1194): n is a, c, g, or t
  misc_feature (1196)..(1201): n is a, c, g, or t
  misc_feature (1204)..(1205): n is a, c, g, or t
  misc_feature (1212)..(1212): n is a, c, g, or t
  misc_feature (1216)..(1216): n is a, c, g, or t
  misc_feature (1218)..(1218): n is a, c, g, or t
  misc_feature (1221)..(1224): n is a, c, g, or t
  misc_feature (1226)..(1226): n is a, c, g, or t
  misc_feature (1230)..(1230): n is a, c, g, or t
  misc_feature (1232)..(1234): n is a, c, g, or t
  misc_feature (1236)..(1236): n is a, c, g, or t
  misc_feature (1244)..(1244): n is a, c, g, or t
  misc_feature (1246)..(1248): n is a, c, g, or t
  misc_feature (1259)..(1263): n is a, c, g, or t
  misc_feature (1269)..(1269): n is a, c, g, or t
  misc_feature (1271)..(1272): n is a, c, g, or t
  misc_feature (1279)..(1282): n is a, c, g, or t
  misc_feature (1286)..(1286): n is a, c, g, or t
  misc_feature (1291)..(1293): n is a, c, g, or t
  misc_feature (1297)..(1297): n is a, c, g, or t
  misc_feature (1299)..(1301): n is a, c, g, or t
  misc_feature (1304)..(1304): n is a, c, g, or t
  misc_feature (1306)..(1306): n is a, c, g, or t
  misc_feature (1310)..(1315): n is a, c, g, or t
  misc_feature (1321)..(1334): n is a, c, g, or t
  misc_feature (1337)..(1338): n is a, c, g, or t
  misc_feature (1340)..(1340): n is a, c, g, or t
  misc_feature (1344)..(1344): n is a, c, g, or t
  misc_feature (1347)..(1347): n is a, c, g, or t
  misc_feature (1349)..(1349): n is a, c, g, or t
tagagagattactatgagaggatcgcatcaccatcaccatcacggatcctatttaggtgacactatagaatcgtcgacccacgcgtccggacgaggggaggagccgctggctcccagccccgccgcgatgagcctcggccgcctttgccgcctactgaagccggcgctgctctgtggggctctggccgcgcctggcctggccgggaccatgtgcgcgtcccgggacgactggcgctgtgcgcgctccatgcacgagttttccgccaaggacatcgacgggcacatggttaacctggacaagtaccggggcttcgtgtgcatcgtcaccaacgtggcctcccagtgaggcaagaccgaagtaaactacactcagctcgtcgacctgcacgcccgatacgctgagtgtggtttgcggatcctggccttcccgtgtaaccagttcgggaagcaggagccagggagtaacgaagagatcaaagagttcgccgcgggctacaacgtcaaattcgatatgttcagcaagatctgcgtgaacggggacgacgcccacccgctgtggaagtggatgaagatccaacccaagggcaagggcatcctgggaaatgccatcaagtggaacttcaccaagttcctcatcgacaagaacggctgcgtggtgaagcgctacggacccatggaggagcccctggtgatagagaaggacctgccccactatttctagctccacaagtgtgtggccccgcccgagcccctgcccacgccctcggagccttccaccggcactcatgacggcctgcctgcaaacctgctggtggggcanacccgaaaatccagcgtgcaccccgccggaggaaggtcccatggcctgctgggcttggctcggcgcccccacccctggctacnttgtgggaataaacngacaattancaaaaaaaaaaaaaanggcggccgctccctatagtgagtcnantaancttaatnanctgaacttggactcctgnttgaaaaatccantaatgactcaaaatncntcnggatttttnaaaanctcgnttcccccgggnnttttttttggngaaanccaannnantnggnnaatttnngganntangaantaaaatggnaaaaaaancccngggnaacccccntttaaatncccnnnggnnnnaaaaaaaattttgnggntttnnnnnntnnnnnnggnncaaaaanaaangnttnnnngnaatnannncnttttaaancnnnaaaaaaaaaannnnntttttncnnctttttnnnntttnccccnnnaaangnnnccnantttnnnnnnaaaaannnnnnnnnnnnnnaanntncccnttncn

SEQ ID NO: 278 - DNA, 902 bp, Homo Sapiens
agaggtcgcatcaccatcaccatcacggatcctatttaggtgacactatagaatcgtcgacccacgcgtccgaaaagattgctgtccactgcacagttcgaggggccaaggcagaagaaatcttggagaagggtctaaaggtgcgggagtatgagttaagaaaaaacaacttctcagatactggaaactttggttttgggatccaggaacacatcgatctgggtatcaaatatgacccaagcattggtatctacggcctggacttctatgtggtgctgggtaggccaggtttcagcatcgcagacaagaagcgcaggacaggctgcattggggccaaacacagaatcagcaaagaggaggccatgcgctggttccagcagaagtatgatgggatcatccttcctggcaaataaattcccgtttctatccaaaagagcaataaaaagttttcagtgaaatgtgaaaaaaaaaaaaaaaagggcggccgctccctatagtgagtcgtattaagcttaattagctgagcttggactcctgttgatagatccagtaatgacctcagaactccatctggatttgttcagaacgctcggttgccgccgggcgttttttattggtgagaatccaagctagcttggcgagattttcaggagctaaggaagctaaaatggagaaaaaaatcactggatataccaccgttgatatatcccaatggcatcgtaaagaacatttttgaggcatttcagtcagttgctcaatgtacctataaccagaccgttcagctggatattacggcctttttaaagaccgtaaagaaaaataagcacaagttttatccggcctttattcacattcttgcccgcctgatgaatgctcatccggaatttcgtatggcaatgaaa

SEQ ID NO: 279 - DNA, 1179 bp, Homo Sapiens
  misc_feature (824)..(824): n is a, c, g, or t
  misc_feature (910)..(910): n is a, c, g, or t
  misc_feature (924)..(924): n is a, c, g, or t
  misc_feature (953)..(953): n is a, c, g, or t
  misc_feature (955)..(955): n is a, c, g, or t
  misc_feature (965)..(965): n is a, c, g, or t
  misc_feature (987)..(987): n is a, c, g, or t
  misc_feature (994)..(994): n is a, c, g, or t
  misc_feature (997)..(997): n is a, c, g, or t
  misc_feature (1005)..(1005): n is a, c, g, or t
  misc_feature (1010)..(1010): n is a, c, g, or t
  misc_feature (1015)..(1015): n is a, c, g, or t
  misc_feature (1034)..(1035): n is a, c, g, or t
  misc_feature (1042)..(1042): n is a, c, g, or t
  misc_feature (1056)..(1056): n is a, c, g, or t
  misc_feature (1062)..(1062): n is a, c, g, or t
  misc_feature (1065)..(1065): n is a, c, g, or t
  misc_feature (1068)..(1068): n is a, c, g, or t
  misc_feature (1071)..(1071): n is a, c, g, or t
  misc_feature (1080)..(1080): n is a, c, g, or t
  misc_feature (1084)..(1085): n is a, c, g, or t
  misc_feature (1089)..(1089): n is a, c, g, or t
  misc_feature (1095)..(1095): n is a, c, g, or t
  misc_feature (1105)..(1105): n is a, c, g, or t
  misc_feature (1118)..(1118): n is a, c, g, or t
  misc_feature (1130)..(1130): n is a, c, g, or t
  misc_feature (1133)..(1133): n is a, c, g, or t
  misc_feature (1136)..(1136): n is a, c, g, or t
  misc_feature (1141)..(1145): n is a, c, g, or t
  misc_feature (1150)..(1154): n is a, c, g, or t
  misc_feature (1156)..(1179): n is a, c, g, or t
attagagaaattactatgagaggatcgcatcaccatcaccatcacggatcctatttaggtgacactatagaatcgtcgacccacgcgtccgcgtcctacaaatatgaagcagacacggtggacctgaattggtgcgtcatttccgacatggaagtcatcgagctgaacaaatgcacctcgggccaatcctttgaagtcatcctgaagccaccctcctttgatggggttcccgagttcaacgcctccctgccaaggcggcgagacccatccctggaagagatccagaagaaactagaagcggctgaggagcgaaggaagtaccaggaagcggagctcctgaaacacctagcagagaaacgggaacatgagagagaggtgatccaaaaggccattgaggaaaacaacaacttcatcaagatggctaaggaaaaactggcccagaagatggaatccaacaaggagaacagggaggcccacctcgccgccatgttggaacggctgcaagagaaggacaagcacgccgaggaggtgcggaaaaacaaggagctgaaggaagaggcctccaggtaaagcctagaggccaaagaactttccaggtcagccggacagctccagcagctccacgttccaggcagcctcgcccgccggctgcgctcccagcactggggtttggggggaggggggtggccaaggggcgtttcctctgcttttggtgtttgtacatgttaagaattgaccagtgaagccatcctatttgtttccggggaacaatgacggggtgggagaggggagaggagagagtttgggaaagggagatggagaanaactcaaggacattgcaaccctgcccggcgcaaatctgattttcacatctctacctggacattgagcctccaggcaccatgttganggaaagatgaaaanccaggggcggttaaaacttcagggtgaangnaaaaagtccntgggtggggcaacggctggcangggcccnccnaaaaaaancccancccanaggggggggtgaagtaccnngtggggnttgctttccccccntgccancanggnggnaataaggtntggnnttgngggggngaaaccatcntttttttgattcntcctggaccaantgnaanctttnnnnnaaaannnnnannnnnnnnnnnnnnnnnnnnnnnn

SEQ ID NO: 280 - DNA, 957 bp, Homo Sapiens
attaactatgagaggtcgcatcaccatcaccatcacggatcctatttaggtgacactatagaatcgtcgacccacgcgtccggtccgatcttccaggatctcggccggccacagccaagcatcgcagtccccaccggccgttacctgtccgtggcggcgcacggccgaggccctcacctgtgcgggcgcctctctgtggctccctctcctccgggcggtggagatctgggccccaaggctctaccgcgcgctccatcgccggcacgccgccctgagcaaggggacagacagcatcccgcggtcacgcagccatgtgtggcccgcggcgccctgccgctgccctctgccggccagcgcgggcaccgggcggcgtcgggtcccaggtacgggcgcggctcccggtgccccctgcccgcgccgccggccgcccctgcacctgctgctcctcccagcgcgcagccgccgctctcaccttgccggccgcctccggctccgccaccccggcgccctccggagctcctcagcggggtgcaggcgcccgagccgccagcggctccgggatgcaggctccgcgccaagccgggagcgggctcggacccaggcgtcccgggggcggccaccgggggcggggacgggaagcggaagcgcggggccgcacggagccgctctaggaccttggaggagctgcgggcctgtgggggtcgcccgcgtcggcggtagctctgtggccggcgggcggcagcgtgcggcccaggggctactctaagccgaggccggcggcccgaactcggtggtattaaccgtgtgcctcctgggctgcagctgggtggtgaggcccgaggctcttcgtaattgtggctgtgtgtctccagccacccgcgccgacctccccggccgggccgacagcgccagccactccgacctgggagagacaaagaaagagggatccaaagacgg

SEQ ID NO: 281 - DNA, 1369 bp, Homo Sapiens
  misc_feature (227)..(227): n is a, c, g, or t
  misc_feature (275)..(275): n is a, c, g, or t
  misc_feature (737)..(737): n is a, c, g, or t
  misc_feature (746)..(746): n is a, c, g, or t
  misc_feature (793)..(793): n is a, c, g, or t
  misc_feature (849)..(849): n is a, c, g, or t
  misc_feature (862)..(862): n is a, c, g, or t
  misc_feature (874)..(874): n is a, c, g, or t
  misc_feature (876)..(876): n is a, c, g, or t
  misc_feature (883)..(883): n is a, c, g, or t
  misc_feature (885)..(885): n is a, c, g, or t
  misc_feature (890)..(890): n is a, c, g, or t
  misc_feature (910)..(910): n is a, c, g, or t
  misc_feature (913)..(913): n is a, c, g, or t
  misc_feature (925)..(925): n is a, c, g, or t
  misc_feature (935)..(935): n is a, c, g, or t
  misc_feature (937)..(937): n is a, c, g, or t
  misc_feature (968)..(968): n is a, c, g, or t
  misc_feature (972)..(972): n is a, c, g, or t
  misc_feature (979)..(979): n is a, c, g, or t
  misc_feature (983)..(983): n is a, c, g, or t
  misc_feature (992)..(992): n is a, c, g, or t
  misc_feature (997)..(997): n is a, c, g, or t
  misc_feature (1007)..(1007): n is a, c, g, or t
  misc_feature (1015)..(1015): n is a, c, g, or t
  misc_feature (1027)..(1027): n is a, c, g, or t
  misc_feature (1031)..(1031): n is a, c, g, or t
  misc_feature (1050)..(1050): n is a, c, g, or t
  misc_feature (1062)..(1062): n is a, c, g, or t
  misc_feature (1065)..(1065): n is a, c, g, or t
  misc_feature (1067)..(1067): n is a, c, g, or t
  misc_feature (1069)..(1069): n is a, c, g, or t
  misc_feature (1071)..(1071): n is a, c, g, or t
  misc_feature (1074)..(1074): n is a, c, g, or t
  misc_feature (1085)..(1085): n is a, c, g, or t
  misc_feature (1087)..(1087): n is a, c, g, or t
  misc_feature (1092)..(1092): n is a, c, g, or t
  misc_feature (1096)..(1096): n is a, c, g, or t
  misc_feature (1107)..(1107): n is a, c, g, or t
  misc_feature (1112)..(1112): n is a, c, g, or t
  misc_feature (1124)..(1124): n is a, c, g, or t
  misc_feature (1126)..(1126): n is a, c, g, or t
  misc_feature (1132)..(1132): n is a, c, g, or t
  misc_feature (1134)..(1134): n is a, c, g, or t
  misc_feature (1137)..(1137): n is a, c, g, or t
  misc_feature (1144)..(1146): n is a, c, g, or t
  misc_feature (1148)..(1149): n is a, c, g, or t
  misc_feature (1152)..(1152): n is a, c, g, or t
  misc_feature (1155)..(1155): n is a, c, g, or t
  misc_feature (1158)..(1158): n is a, c, g, or t
  misc_feature (1164)..(1164): n is a, c, g, or t
  misc_feature (1179)..(1180): n is a, c, g, or t
  misc_feature (1187)..(1187): n is a, c, g, or t
  misc_feature (1192)..(1192): n is a, c, g, or t
  misc_feature (1205)..(1206): n is a, c, g, or t
  misc_feature (1211)..(1211): n is a, c, g, or t
  misc_feature (1214)..(1215): n is a, c, g, or t
  misc_feature (1219)..(1219): n is a, c, g, or t
  misc_feature (1225)..(1225): n is a, c, g, or t
  misc_feature (1230)..(1235): n is a, c, g, or t
  misc_feature (1240)..(1242): n is a, c, g, or t
  misc_feature (1245)..(1246): n is a, c, g, or t
  misc_feature (1250)..(1250): n is a, c, g, or t
  misc_feature (1254)..(1256): n is a, c, g, or t
  misc_feature (1258)..(1259): n is a, c, g, or t
  misc_feature (1263)..(1263): n is a, c, g, or t
  misc_feature (1268)..(1268): n is a, c, g, or t
  misc_feature (1273)..(1274): n is a, c, g, or t
  misc_feature (1276)..(1277): n is a, c, g, or t
  misc_feature (1279)..(1280): n is a, c, g, or t
  misc_feature (1289)..(1294): n is a, c, g, or t
  misc_feature (1301)..(1305): n is a, c, g, or t
  misc_feature (1310)..(1312): n is a, c, g, or t
  misc_feature (1314)..(1316): n is a, c, g, or t
  misc_feature (1319)..(1320): n is a, c, g, or t
  misc_feature (1324)..(1324): n is a, c, g, or t
  misc_feature (1333)..(1336): n is a, c, g, or t
  misc_feature (1341)..(1341): n is a, c, g, or t
  misc_feature (1343)..(1348): n is a, c, g, or t
  misc_feature (1356)..(1358): n is a, c, g, or t
  misc_feature (1360)..(1365): n is a, c, g, or t
  misc_feature (1367)..(1369): n is a, c, g, or t
gagaaattactatgagaggatcgcatcaccatcaccatcacggatcctatttaggtgacactatagaatcgtcgacccacgcgtccgcggacgcgtgggcggacgcgtgggagcggatcgcgggctcgggctgcggggctccggctgcgggcgctgggccgcgaggcgcggagcttgggagcggagcccaggccgtgccgcgcggcgccatgaagggcaaggagganaaggagggcggcgcacggctgggcgctggcggcggaagccccgagaanagcccgagcgcgcaggagctcaaggagcagggcaatcgtctgttcgtgggccgaaagtacccggaggcggcggcctgctacggccgcgcgatcacccggaacccgctggtggccgtgtattacaccaaccgggccttgtgctacctgaagatgcagcagcacgagcaggccctggccgactgccggcgcgccctggagctggacgggcagtctgtgaaggcgcacttcttcctggggcagtgccagctggagatggagagctatgatgaggccatcgccaatctgcagcgagcttacagcctggccaaggagcagcggctgaacttcggggacgacatccccagcgctcttcgaatcgcgaagaagaagcgctggaacagcattgaggagcggcgcatccaccaggagagcgagctgcactcctacctctccaggctcattgccgcggagcgtgagaggganctggaagantgccagcgaaaccacgagggtgatgaggacgacagccacgtccgggnccagcaggcctgcattgaggccaagcacgacaagtacatggcggaacatggacganctttttttctcangtggatgaaaanangaaaaancnagacntccccaactacctgtgtggnaanatcacttttganctgatgcggnanccgtgcatcacgcccagtggcatcacttacnaccncaagganatcnagaaacacntgcancgtgtgggtnatttttanccccgtgaaccngaancccctgaaccaagaaaaanttcatccccaanttngntntnaangaagtttattnanccttntttntttaaaatggnttggnggaaaaatattnangttccntnccntactggnnncnngtncanggnaacctngggaaaaaacccccnnccctaanaaaanttttttttctggnnacccnaanntttncccaanttttnnnnnnaaacnnnaanntttncccnnnannaccnttttnggggnngnnannccccttttnnnnnnaaaaaannnnnggggnnngnnnaanncttnccccctttnnnnaaaancnnnnnnaaaaaaannngnnnnnntnnn

SEQ ID NO: 282 - DNA, 1195 bp, Homo Sapiens
  misc_feature (857)..(857): n is a, c, g, or t
  misc_feature (859)..(859): n is a, c, g, or t
  misc_feature (863)..(863): n is a, c, g, or t
  misc_feature (865)..(868): n is a, c, g, or t
  misc_feature (870)..(873): n is a, c, g, or t
  misc_feature (876)..(876): n is a, c, g, or t
  misc_feature (879)..(893): n is a, c, g, or t
  misc_feature (900)..(902): n is a, c, g, or t
  misc_feature (906)..(906): n is a, c, g, or t
  misc_feature (908)..(908): n is a, c, g, or t
  misc_feature (919)..(919): n is a, c, g, or t
  misc_feature (922)..(922): n is a, c, g, or t
  misc_feature (930)..(930): n is a, c, g, or t
  misc_feature (957)..(957): n is a, c, g, or t
  misc_feature (976)..(976): n is a, c, g, or t
  misc_feature (984)..(984): n is a, c, g, or t
  misc_feature (987)..(987): n is a, c, g, or t
  misc_feature (989)..(989): n is a, c, g, or t
  misc_feature (995)..(995): n is a, c, g, or t
  misc_feature (1000)..(1000): n is a, c, g, or t
  misc_feature (1003)..(1003): n is a, c, g, or t
  misc_feature (1019)..(1019): n is a, c, g, or t
  misc_feature (1026)..(1027): n is a, c, g, or t
  misc_feature (1037)..(1037): n is a, c, g, or t
  misc_feature (1051)..(1051): n is a, c, g, or t
  misc_feature (1053)..(1053): n is a, c, g, or t
  misc_feature (1062)..(1062): n is a, c, g, or t
  misc_feature (1070)..(1070): n is a, c, g, or t
  misc_feature (1074)..(1074): n is a, c, g, or t
  misc_feature (1086)..(1087): n is a, c, g, or t
  misc_feature (1090)..(1090): n is a, c, g, or t
  misc_feature (1096)..(1096): n is a, c, g, or t
  misc_feature (1102)..(1102): n is a, c, g, or t
  misc_feature (1104)..(1104): n is a, c, g, or t
  misc_feature (1106)..(1106): n is a, c, g, or t
  misc_feature (1118)..(1118): n is a, c, g, or t
  misc_feature (1126)..(1126): n is a, c, g, or t
  misc_feature (1128)..(1128): n is a, c, g, or t
  misc_feature (1144)..(1144): n is a, c, g, or t
  misc_feature (1149)..(1149): n is a, c, g, or t
  misc_feature (1158)..(1158): n is a, c, g, or t
  misc_feature (1165)..(1165): n is a, c, g, or t
  misc_feature (1172)..(1172): n is a, c, g, or t
  misc_feature (1174)..(1175): n is a, c, g, or t
  misc_feature (1179)..(1180): n is a, c, g, or t
  misc_feature (1185)..(1185): n is a, c, g, or t
  misc_feature (1189)..(1189): n is a, c, g, or t
  misc_feature (1191)..(1191): n is a, c, g, or t
  misc_feature (1194)..(1194): n is a, c, g, or t
atagagagattactatgagaggatcgcatcaccatcaccatcacggatcctatttaggtgacactatagaatcgtcgacccacgcgtccgccgaacttccggctctcactgctaggggcttaagcggagggagtcgagccagcgtcgccgcgatggtgttgttggagagcgagcagttcctgacggagctgaccagacttttccagaagtgccggacgtcgggcagcgtctatatcaccttgaagaagtatgacggtcgaaccaaacccattccaaagaaaggtactgtggagggctttgagcccgcagacaacaagtgtctgttaagagctaccgatgggaagaagaagatcagcactgtggtgagctccaaggaagtgaataagtttcagatggcttattcaaacctccttagagctaacatggatgggttgaagaagagagacaaaaagaacaaaactaagaagaccaaagcagcagcagcagcagcagcagcagcacctgccgcagcagcaacagcagcaacaacagcagcaacaacagcagcaacagcagcacagtaaagggcatacatttcctgctttcaccaattaaccactgaattgctattttttccttttggccagatagctaggtttctggttcccccacagtaggtgttttcacataagattagggtccttttggaaagaatagttgcagtgtttataggatagttgtggtaagaatctagtttattttgcatttggctaattggtctgtgctgcatggttatatactcctggattatagattaaaagtctccgtagacatctctgtgaagagcaagctatcattaaacatgtctgttttatccnanaaanannnnannnnaanaannnnnnnnnnnnnnnaaagggnnncccncntcccttatagngangtcctatnaagccttaattaacctgaaccttgganctccttgttgaaaaaatcngtaatganccncnaaaacnccctnttngattttttcaaaaccnccggttnncccccgggcngttttttttttggngnaaatccaanctagcttngggngaaattttcggnnctnaggaancttaantngnaaaaaaaaaatnccggggantncccccgtttaaatttnccatnggcatcctnaaaaaanttttaangnntttnnatccnttgncncang

SEQ ID NO: 283 - DNA, 582 bp, Homo Sapiens
  misc_feature (2)..(2): n is a, c, g, or t
  misc_feature (9)..(9): n is a, c, g, or t
  misc_feature (521)..(521): n is a, c, g, or t
  misc_feature (524)..(524): n is a, c, g, or t
  misc_feature (528)..(528): n is a, c, g, or t
  misc_feature (535)..(535): n is a, c, g, or t
  misc_feature (549)..(549): n is a, c, g, or t
  misc_feature (552)..(552): n is a, c, g, or t
  misc_feature (564)..(564): n is a, c, g, or t
  misc_feature (566)..(566): n is a, c, g, or t
  misc_feature (572)..(572): n is a, c, g, or t
antagaganattactatgagaggatcgcatcaccatcaccatcacggatcctatttaggtgacactatagaatcgtcgacccacgcgtccgaggtgagaggcgcctctgcccagctgcccctactgggaagtgaggagcccctctgcccggctagccgccccgtccaggagggaggtgggggggtcagccccccacccagccagccgccttgtccgggagggaggtggggtgatcagccccccacctggccagccaccccatccgggagggaggtggggtggttaaccccccgccaggccagccgccccctccaggagggaggtgggggggtcagccccccgcccagccagccgccccgtccgggaggtgaggggcgcctctgcccagccgcccctactgggaagtgaggagcccctctgcccggccagccaccccgtccgggaggtgggggggtcagccccccgcccggccagccgccccgtccgggaggtgaggggcgcctctgcccggccgcccctantgngaantgaggancccctctgcccggncanccgccctgtccncnagggangtgggggggt

SEQ ID NO: 284 - DNA, 1413 bp, Homo Sapiens
  misc_feature (802)..(802): n is a, c, g, or t
  misc_feature (845)..(845): n is a, c, g, or t
  misc_feature (865)..(865): n is a, c, g, or t
  misc_feature (885)..(885): n is a, c, g, or t
  misc_feature (900)..(900): n is a, c, g, or t
  misc_feature (903)..(903): n is a, c, g, or t
  misc_feature (913)..(913): n is a, c, g, or t
  misc_feature (930)..(930): n is a, c, g, or t
  misc_feature (935)..(935): n is a, c, g, or t
  misc_feature (954)..(954): n is a, c, g, or t
  misc_feature (968)..(968): n is a, c, g, or t
  misc_feature (976)..(976): n is a, c, g, or t
  misc_feature (978)..(978): n is a, c, g, or t
  misc_feature (987)..(987): n is a, c, g, or t
  misc_feature (989)..(989): n is a, c, g, or t
  misc_feature (1000)..(1000): n is a, c, g, or t
  misc_feature (1005)..(1005): n is a, c, g, or t
  misc_feature (1007)..(1007): n is a, c, g, or t
  misc_feature (1023)..(1024): n is a, c, g, or t
  misc_feature (1027)..(1027): n is a, c, g, or t
  misc_feature (1030)..(1030): n is a, c, g, or t
  misc_feature (1032)..(1032): n is a, c, g, or t
  misc_feature (1036)..(1036): n is a, c, g, or t
  misc_feature (1042)..(1042): n is a, c, g, or t
  misc_feature (1053)..(1053): n is a, c, g, or t
  misc_feature (1057)..(1057): n is a, c, g, or t
  misc_feature (1061)..(1061): n is a, c, g, or t
  misc_feature (1064)..(1064): n is a, c, g, or t
  misc_feature (1067)..(1067): n is a, c, g, or t
  misc_feature (1069)..(1069): n is a, c, g, or t
  misc_feature (1072)..(1072): n is a, c, g, or t
  misc_feature (1074)..(1075): n is a, c, g, or t
  misc_feature (1083)..(1085): n is a, c, g, or t
  misc_feature (1088)..(1089): n is a, c, g, or t
  misc_feature (1091)..(1093): n is a, c, g, or t
  misc_feature (1095)..(1096): n is a, c, g, or t
  misc_feature (1102)..(1102): n is a, c, g, or t
  misc_feature (1105)..(1106): n is a, c, g, or t
  misc_feature (1108)..(1110): n is a, c, g, or t
  misc_feature (1116)..(1116): n is a, c, g, or t
  misc_feature (1124)..(1125): n is a, c, g, or t
  misc_feature (1129)..(1130): n is a, c, g, or t
  misc_feature (1134)..(1134): n is a, c, g, or t
  misc_feature (1139)..(1139): n is a, c, g, or t
  misc_feature (1144)..(1144): n is a, c, g, or t
  misc_feature (1147)..(1148): n is a, c, g, or t
  misc_feature (1153)..(1153): n is a, c, g, or t
  misc_feature (1156)..(1158): n is a, c, g, or t
  misc_feature (1160)..(1161): n is a, c, g, or t
  misc_feature (1166)..(1167): n is a, c, g, or t
  misc_feature (1170)..(1170): n is a, c, g, or t
  misc_feature (1172)..(1174): n is a, c, g, or t
  misc_feature (1184)..(1186): n is a, c, g, or t
  misc_feature (1188)..(1191): n is a, c, g, or t
  misc_feature (1193)..(1196): n is a, c, g, or t
  misc_feature (1200)..(1201): n is a, c, g, or t
  misc_feature (1203)..(1203): n is a, c, g, or t
  misc_feature (1205)..(1206): n is a, c, g, or t
  misc_feature (1209)..(1209): n is a, c, g, or t
  misc_feature (1212)..(1213): n is a, c, g, or t
  misc_feature (1217)..(1218): n is a, c, g, or t
  misc_feature (1221)..(1228): n is a, c, g, or t
  misc_feature (1232)..(1233): n is a, c, g, or t
  misc_feature (1236)..(1237): n is a, c, g, or t
  misc_feature (1239)..(1242): n is a, c, g, or t
  misc_feature (1247)..(1248): n is a, c, g, or t
  misc_feature (1252)..(1253): n is a, c, g, or t
  misc_feature (1258)..(1259): n is a, c, g, or t
  misc_feature (1261)..(1263): n is a, c, g, or t
  misc_feature (1266)..(1278): n is a, c, g, or t
  misc_feature (1280)..(1280): n is a, c, g, or t
  misc_feature (1282)..(1282): n is a, c, g, or t
  misc_feature (1284)..(1286): n is a, c, g, or t
  misc_feature (1290)..(1296): n is a, c, g, or t
  misc_feature (1298)..(1299): n is a, c, g, or t
  misc_feature (1301)..(1301): n is a, c, g, or t
  misc_feature (1306)..(1310): n is a, c, g, or t
  misc_feature (1314)..(1314): n is a, c, g, or t
  misc_feature (1316)..(1329): n is a, c, g, or t
  misc_feature (1331)..(1338): n is a, c, g, or t
  misc_feature (1344)..(1353): n is a, c, g, or t
  misc_feature (1355)..(1355): n is a, c, g, or t
  misc_feature (1357)..(1357): n is a, c, g, or t
  misc_feature (1359)..(1359): n is a, c, g, or t
  misc_feature (1361)..(1362): n is a, c, g, or t
  misc_feature (1364)..(1374): n is a, c, g, or t
  misc_feature (1378)..(1381): n is a, c, g, or t
  misc_feature (1383)..(1392): n is a, c, g, or t
  misc_feature (1396)..(1397): n is a, c, g, or t
  misc_feature (1399)..(1406): n is a, c, g, or t
  misc_feature (1408)..(1408): n is a, c, g, or t
  misc_feature (1410)..(1410): n is a, c, g, or t
tagagagattactatgagaggatcgcatcaccatcaccatcacggatcctatttaggtgacactatagaatcgtcgacccacgcgtccgcgctgttcacgtcccgtcggcctcctgcacagcccacacgctgcgcccggaaggcccctgctgtggagaagccggacccatccccgaggtccccagcgaggacacacactccacgagagcagcccctccactctgcccaggagaggggccgaccctcctcgggaaccggccacccgcgtggctcccagcatccatcaggacaagcccacgtggggtcctccctgcgtgctcagagggtctgtccagccctgggaagcgaccttggcctcagttcacagcctggtgctcatctgctggcaccgggcatccacccatcagcccccgccctgtccctccgaaggacacccagcaggcaccccccggggaggcaggggcagaggtcagaaggggtgtctgggacctggatggccagcagggacaggggcattgtcatctcaaaggcccaacccccagaggccacaccagtcctcccagggagtcctcgagtcgccctgcccagagccctggcaccagagacgccaagagcctgtggggtgactcggagcagcaggtgtggccccgggcgggcggcaccgcgtccagggcagcctccctccgctgagtgacacgggacaccagtgcccggccgacgcgcctttgcaggagaaatgtgcaaacctctgtggataccatttcatttccattcttgtgttgtctccaaggcccctttgganatatacttggtgttggttgtgtttttttggttccttttcaaanaactgtaaaccgaggctgangtgctccactgactgtgccnaggggcggggggcangangacggcaaanctatttataatatttancgaanttcggtctcccttcaaatnccccgcgagggaangttgctgnanccaccccgntntcccccatganaaaantntgtaaataccttgggnnaanaangnccanttcccntcctggggtcncctntganggntgntngtncnntgaaaaannnggnnannntnnaaattnttnnannnaaaaanaaaaaggnntttnntttnaaatnaaaanggnnaaaanttnnntnnttttnnggnannnttttttcccnnnannnntnnnnaaanntncnnttnccnnaaanntgnnnnnnnnaaanntcnntnnnnggggnntttnnaaggnnannnttnnnnnnnnnnnnncncncnnnaaannnnnnncnntntcttnnnnngggntnnnnnnnnnnnnnncnnnnnnnntttttnnnnnnnnnntnananannannnnnnnnnnntttnnnncnnnnnnnnnntttnncnnnnnnnngngnaaa

SEQ ID NO: 285 - DNA, 845 bp, Homo Sapiens
  misc_feature (104)..(104): n is a, c, g, or t
  misc_feature (117)..(117): n is a, c, g, or t
  misc_feature (131)..(131): n is a, c, g, or t
  misc_feature (145)..(145): n is a, c, g, or t
  misc_feature (151)..(151): n is a, c, g, or t
  misc_feature (160)..(160): n is a, c, g, or t
  misc_feature (177)..(177): n is a, c, g, or t
  misc_feature (233)..(233): n is a, c, g, or t
  misc_feature (252)..(252): n is a, c, g, or t
  misc_feature (258)..(258): n is a, c, g, or t
  misc_feature (268)..(268): n is a, c, g, or t
  misc_feature (281)..(281): n is a, c, g, or t
  misc_feature (306)..(306): n is a, c, g, or t
  misc_feature (321)..(321): n is a, c, g, or t
  misc_feature (356)..(356): n is a, c, g, or t
  misc_feature (380)..(380): n is a, c, g, or t
  misc_feature (401)..(401): n is a, c, g, or t
  misc_feature (424)..(424): n is a, c, g, or t
  misc_feature (431)..(431): n is a, c, g, or t
  misc_feature (453)..(453): n is a, c, g, or t
  misc_feature (459)..(459): n is a, c, g, or t
  misc_feature (508)..(508): n is a, c, g, or t
  misc_feature (528)..(528): n is a, c, g, or t
  misc_feature (533)..(533): n is a, c, g, or t
  misc_feature (612)..(612): n is a, c, g, or t
  misc_feature (628)..(628): n is a, c, g, or t
  misc_feature (637)..(637): n is a, c, g, or t
  misc_feature (656)..(656): n is a, c, g, or t
  misc_feature (663)..(663): n is a, c, g, or t
  misc_feature (713)..(713): n is a, c, g, or t
  misc_feature (737)..(737): n is a, c, g, or t
  misc_feature (755)..(755): n is a, c, g, or t
  misc_feature (766)..(766): n is a, c, g, or t
  misc_feature (783)..(783): n is a, c, g, or t
  misc_feature (785)..(785): n is a, c, g, or t
agagaaattactatgagaggatcgcatcaccattcaccatcacggatcctatttaggtgacactatagaatcgtcgacccacgcgtccggctgggccgggcccnagcggatcgcggnctcggtctgcgggnctccggctgcgggngctggnccgcgaggngcggagcttgggagcgnagcccaggccgtgccgcgcggcgccatgaagggcaaggaggagaaggagggcggcncacggctgggcgctggcgncggaanccccgagaanagcccgagcgcgnaggagctcaaggagcagggcaatcntctgttcgtgggccnaaagtacccggaggcggcggcctgctacggccgcncgatcacccggaacccgctggtgnccgtgtattacaccaaccggnccttgtgctacctgaagatgcancagcacnagcaggccctggccgactgccngcgcgncctggagctggacgggcagtctgtgaaggcgcacttcttcctggggcantgccagctggagatggaganctatnatgaggccatcgccaatctgcagcgagcttacagcctggccaaggagcagcggctgaacttcggggacaacatccccancgctcttcgaatcgcnaataagaancgctggaacagcattgagnagcggcncatccaccaggagagcgagctgcactcctacctctccaggctcattgccncggagcgtgagagggagctggaanagtgccagcgaaaccacnagggtgatgangacgacaaccacgtccngncccagcaagcctgcattgaggccaagcacgacaagtacatggcggaacatggacgagctt

SEQ ID NO: 286 - DNA, 1200 bp, Homo Sapiens
  misc_feature (890)..(890): n is a, c, g, or t
  misc_feature (916)..(916): n is a, c, g, or t
  misc_feature (918)..(918): n is a, c, g, or t
  misc_feature (934)..(934): n is a, c, g, or t
  misc_feature (936)..(936): n is a, c, g, or t
  misc_feature (955)..(955): n is a, c, g, or t
  misc_feature (965)..(965): n is a, c, g, or t
  misc_feature (976)..(976): n is a, c, g, or t
  misc_feature (1001)..(1001): n is a, c, g, or t
  misc_feature (1025)..(1025): n is a, c, g, or t
  misc_feature (1040)..(1040): n is a, c, g, or t
  misc_feature (1043)..(1043): n is a, c, g, or t
  misc_feature (1057)..(1057): n is a, c, g, or t
  misc_feature (1062)..(1063): n is a, c, g, or t
  misc_feature (1067)..(1067): n is a, c, g, or t
  misc_feature (1071)..(1071): n is a, c, g, or t
  misc_feature (1074)..(1074): n is a, c, g, or t
  misc_feature (1108)..(1108): n is a, c, g, or t
  misc_feature (1122)..(1122): n is a, c, g, or t
  misc_feature (1129)..(1129): n is a, c, g, or t
  misc_feature (1132)..(1132): n is a, c, g, or t
  misc_feature (1144)..(1145): n is a, c, g, or t
  misc_feature (1155)..(1155): n is a, c, g, or t
  misc_feature (1175)..(1175): n is a, c, g, or t
  misc_feature (1191)..(1200): n is a, c, g, or t
tagagaaattactatgagaggatcgcatcaccatcaccatcacggatcctatttaggtgacactatagaatcgtcgacccacgcgtccgatcatccacgtgcagacgctgacccaggagaacgtcagctgcctcaacaccagcctggtgatcctgatgctggcccgacggaaagagcggctgcccctgtacctgcggctgctgcagcggatggagcacagcaagaagtaccccggcttcctgctcaacaacttccacaacctgctgcgcttctggcagcagcactacctgcacaaggacaaggacagcacctgcctagagaacagctcctgcatcagcttctcatactggaaggagacagtgtccatcctgttgaacccggaccggcagtcaccctctgctctcgttagctacattgaggagccctacatggacatagacagggacttcactgaggagtgaccttgggccaggcctcgggaggctgctgggccagtgtgggtgagcgtgggtacgatgccacacgccctgccctgttcccgttcctccctgctgctctctgcctgccccaggtctttgggtacaggcttggtgggagggaagtcctagaagcccttggtccccctgggtctgagggccctaggtcatggagagcctcagtccccataatgaggacagggtaccatgcccacctttccttcagaaccctggggcccagggccacccagaggtaagaggacatttagcattagctctgtgtgagctcctgccggtttcttggctgtcagtcagtcccagagtggggaggaagatatgggtgacccccaccccccatctgtgagccaagcctcccttgtccctggcctttggacccaggcaaaggcttctganccctgggcaggggtggtgggtaccananaatgctgccttccccnangcctgcccctctgcctcantttcctgtanctcctctggtnctgtttgctcatgggccgctgtgtncatccaagggggttctcccaaaantgaggggccttttcntcnatcccttggggcanggggnnactntgcntgncctgcctttgcctgaggaaccccttctgcttaanctgaaatggggccnttcttgnttnccatttttaacnncaaaaaaccntttaatggaaacattaaaantttttttaaaaaaaannnnnnnnnn

SEQ ID NO: 287 - DNA, 962 bp, Homo Sapiens
ggctgcttggccatatttgtcactgtgatctccctcttggtgtacaaaaaacacaaggaatacaacccaatagaaaatagtcctgggaatgtggtcagaagcaaaggcctgagtgtctttctcaaccgtgcaaaagccgtgttcttcccgggaaaccaggaaaaggatccgctactcaaaaaccaagaatttaaaggagtttcttaagcggccgctccctatagtgagtcgtattaagcttaattagctgagcttggactcctgttgatagatccagtaatgacctcagaactccatctggatttgttcagaacgctcggttgccgccgggcgttttttattggtgagaatccaagctagcttggcgagattttcaggagctaaggaagctaaaatggagaaaaaaatcactggatataccaccgttgatatatcccaatggcatcgtaaagaacattttgaggcatttcagtcagttgctcaatgtacctataaccagaccgttcagctggatattacggcctttttaaagaccgtaaagaaaaataagcacaagttttatccggcctttattcacattcttgcccgcctgatgaatgctcatccggaatttcgtatggcaatgaaagacggtgagctggtgatatgggatagtgttcacccttgttacaccgttttccatgagcaaactgaaacgttttcatcgctctggagtgaataccacgacgatttccggcagtttctacacatatattcgcaagatgtggcgtgttacggtgaaaacctggcctatttccctaaagggtttattgagaatatgtttttcgtctcagccaatccctgggtgagtttcaccagttttgatttaaacgtggccaatatggacaacttcttcgccccgttttcaccatgggcaaatatatacgcaaggcgacaggtgctgatgccgctggcgattcagt

SEQ ID NO: 288 - DNA, 1350 bp, Homo Sapiens
  misc_feature (718)..(718): n is a, c, g, or t
  misc_feature (747)..(747): n is a, c, g, or t
  misc_feature (755)..(755): n is a, c, g, or t
  misc_feature (790)..(790): n is a, c, g, or t
  misc_feature (842)..(842): n is a, c, g, or t
  misc_feature (881)..(881): n is a, c, g, or t
  misc_feature (887)..(887): n is a, c, g, or t
  misc_feature (895)..(895): n is a, c, g, or t
  misc_feature (925)..(925): n is a, c, g, or t
  misc_feature (930)..(930): n is a, c, g, or t
  misc_feature (934)..(934): n is a, c, g, or t
  misc_feature (944)..(944): n is a, c, g, or t
  misc_feature (947)..(947): n is a, c, g, or t
  misc_feature (955)..(955): n is a, c, g, or t
  misc_feature (963)..(963): n is a, c, g, or t
  misc_feature (968)..(968): n is a, c, g, or t
  misc_feature (975)..(975): n is a, c, g, or t
  misc_feature (980)..(980): n is a, c, g, or t
  misc_feature (984)..(984): n is a, c, g, or t
  misc_feature (988)..(988): n is a, c, g, or t
  misc_feature (990)..(990): n is a, c, g, or t
  misc_feature (996)..(996): n is a, c, g, or t
  misc_feature (1008)..(1008): n is a, c, g, or t
  misc_feature (1013)..(1015): n is a, c, g, or t
  misc_feature (1022)..(1022): n is a, c, g, or t
  misc_feature (1036)..(1037): n is a, c, g, or t
  misc_feature (1044)..(1044): n is a, c, g, or t
  misc_feature (1072)..(1073): n is a, c, g, or t
  misc_feature (1082)..(1082): n is a, c, g, or t
  misc_feature (1086)..(1086): n is a, c, g, or t
  misc_feature (1088)..(1088): n is a, c, g, or t
  misc_feature (1093)..(1093): n is a, c, g, or t
  misc_feature (1097)..(1098): n is a, c, g, or t
  misc_feature (1101)..(1101): n is a, c, g, or t
  misc_feature (1104)..(1104): n is a, c, g, or t
  misc_feature (1111)..(1111): n is a, c, g, or t
  misc_feature (1117)..(1118): n is a, c, g, or t
  misc_feature (1122)..(1122): n is a, c, g, or t
  misc_feature (1150)..(1150): n is a, c, g, or t
  misc_feature (1159)..(1159): n is a, c, g, or t
  misc_feature (1162)..(1162): n is a, c, g, or t
  misc_feature (1165)..(1166): n is a, c, g, or t
  misc_feature (1171)..(1171): n is a, c, g, or t
  misc_feature (1177)..(1177): n is a, c, g, or t
  misc_feature (1180)..(1180): n is a, c, g, or t
  misc_feature (1183)..(1183): n is a, c, g, or t
  misc_feature (1185)..(1185): n is a, c, g, or t
  misc_feature (1193)..(1193): n is a, c, g, or t
  misc_feature (1196)..(1196): n is a, c, g, or t
  misc_feature (1216)..(1217): n is a, c, g, or t
  misc_feature (1219)..(1219): n is a, c, g, or t
  misc_feature (1228)..(1230): n is a, c, g, or t
  misc_feature (1235)..(1235): n is a, c, g, or t
  misc_feature (1242)..(1242): n is a, c, g, or t
  misc_feature (1255)..(1255): n is a, c, g, or t
  misc_feature (1260)..(1260): n is a, c, g, or t
  misc_feature (1280)..(1280): n is a, c, g, or t
  misc_feature (1283)..(1283): n is a, c, g, or t
  misc_feature (1294)..(1294): n is a, c, g, or t
  misc_feature (1309)..(1309): n is a, c, g, or t
  misc_feature (1314)..(1317): n is a, c, g, or t
  misc_feature (1319)..(1319): n is a, c, g, or t
  misc_feature (1321)..(1321): n is a, c, g, or t
  misc_feature (1330)..(1330): n is a, c, g, or t
  misc_feature (1334)..(1335): n is a, c, g, or t
  misc_feature (1342)..(1342): n is a, c, g, or t
  misc_feature (1345)..(1345): n is a, c, g, or t
  misc_feature (1350)..(1350): n is a, c, g, or t
tagagaaattactatgagaggatcgcatcaccatcaccatcacggatcctatttaggtgacactatagaatcgtcgacccacgcgtccggctgggccgggcccgagcggatcgcgggctcgggctgcggggctccggctgcgggcgctgggccgcgaggcgcggagcttgggagcggagcccaggccgtgccgcgcggcgccatgaagggcaaggaggagaaggagggcggcgcacggctgggcgctggcggcggaagccccgagaagagcccgagcgcgcaggagctcaaggagcagggcaatcgtctgttcgtgggccgaaagtacccggaggcggcggcctgctacggccgcgcgatcacccggaacccgctggtggccgtgtattacaccaaccgggccttgtgctacctgaagatgcagcagcacgagcaggccctggccgactgccggcgcgccctggagctggacgggcagtctgtgaaggcgcacttcttcctggggcagtgccagctggagatggagagctatgatgaggccatcgccaatctgcagcgagcttacagcctggccaaggagcagcggctgaacttcggggacgacatccccagcgctcttcgaatcgcgaagaagaagcgctggaacagcattgaggagcggcgcatccaccaggagagcgagctgcactcctacctctccaggctcattgccgcggancgtgagagggagctggaaaagtgccaacnaaaccacnagggtgatgaggacgacagccacgtccgggcccancaggcctgcattgaggccaagcacgaacaagtacattggcgaacatggaacnaacttttttttttcaggtggatgaaaaaaaggaaaaaancgaaancttccccnaattacttgttttggcaaagatcacctttnaactnaatncgggaaaccnttncattcacnccccagtngcatnaccttanaaccncaangaanantcgagnaaacaccttgcnaacgnnngggttantttttaaacccgtnnaccccgnaaacccccttgaaccaagaaaaaacttnnttccccaantttntnttttnaaannaanttnttttaancctttnncttntttaaaaaatgggttggggggaaaaaanaatgaaganttnccnntcccnaacttnggntcntnttcaaagnaanacctttggaaaaaaaccccnncnccctaaaannnatttnttttttnggaccccaaaaanttttnccaatttttgttttaaaatnaanaaattttcccnccaaaaaattttttntgggnnnnananccctttttngggnnaaaaaanggntagtn

SEQ ID NO: 289 - DNA, 1200 bp, Homo Sapiens
  misc_feature (917)..(917): n is a, c, g, or t
  misc_feature (920)..(920): n is a, c, g, or t
  misc_feature (923)..(923): n is a, c, g, or t
  misc_feature (931)..(931): n is a, c, g, or t
  misc_feature (934)..(934): n is a, c, g, or t
  misc_feature (937)..(937): n is a, c, g, or t
  misc_feature (954)..(954): n is a, c, g, or t
  misc_feature (966)..(966): n is a, c, g, or t
  misc_feature (976)..(976): n is a, c, g, or t
  misc_feature (982)..(983): n is a, c, g, or t
  misc_feature (990)..(993): n is a, c, g, or t
  misc_feature (996)..(998): n is a, c, g, or t
  misc_feature (1000)..(1001): n is a, c, g, or t
  misc_feature (1003)..(1005): n is a, c, g, or t
  misc_feature (1022)..(1022): n is a, c, g, or t
  misc_feature (1026)..(1026): n is a, c, g, or t
  misc_feature (1029)..(1029): n is a, c, g, or t
  misc_feature (1038)..(1038): n is a, c, g, or t
  misc_feature (1040)..(1040): n is a, c, g, or t
  misc_feature (1044)..(1044): n is a, c, g, or t
  misc_feature (1052)..(1052): n is a, c, g, or t
  misc_feature (1059)..(1059): n is a, c, g, or t
  misc_feature (1065)..(1065): n is a, c, g, or t
  misc_feature (1068)..(1068): n is a, c, g, or t
  misc_feature (1077)..(1077): n is a, c, g, or t
  misc_feature (1081)..(1081): n is a, c, g, or t
  misc_feature (1091)..(1091): n is a, c, g, or t
  misc_feature (1102)..(1103): n is a, c, g, or t
  misc_feature (1109)..(1109): n is a, c, g, or t
  misc_feature (1111)..(1111): n is a, c, g, or t
  misc_feature (1119)..(1120): n is a, c, g, or t
  misc_feature (1124)..(1124): n is a, c, g, or t
  misc_feature (1126)..(1126): n is a, c, g, or t
  misc_feature (1140)..(1141): n is a, c, g, or t
  misc_feature (1148)..(1148): n is a, c, g, or t
  misc_feature (1163)..(1164): n is a, c, g, or t
  misc_feature (1167)..(1167): n is a, c, g, or t
  misc_feature (1176)..(1177): n is a, c, g, or t
  misc_feature (1186)..(1186): n is a, c, g, or t
  misc_feature (1197)..(1197): n is a, c, g, or t
attagagaaattactatgagaggatcgcatcaccatcaccatcacggatcctatttaggtgacactatagaatcgtcgacccacgcgtccgcggacgcgtgggggggtaacaagatggcgaccgagacggtggagctccataagctaaagcttgccgaactaaagcaagaatgtcttgctcgtggtttggagaccaagggaataaagcaagatcttatccacagactccaggcatatcttgaagaacatgctgaagaggaggcaaatgaagaagatgtactgggagatgaaacagaggaagaagaaacaaagcccattgagctccctgtcaaagaggaagaaccccctgaaaaaactgttgatgtggcagcagagaagaaagtggtgaaaattacatctgaaataccacagactgagagaatgcagaagagggctgaacgattcaatgtacctgtgagcttggagagtaagaaagctgctcgggcagctaggtttgggatttcttcagttccaacaaaaggtctgtcatctgataacaaacctatggttaacttggataagctgaaggaaagagctcaaagatttggtttgaatgtctcttcaatctccagaaagtctgaagatgatgagaaactgaaaaagaggaaggagcgatttgggattgtcacaagttcagctggaactggaaccacagaggatacagaggcaaagaagaggaaaagagcagagcgctttgggattgcctgatgaaaagttcctgatactttctgttctccagtgttttccatttctctccttcttcttggtcacatatatgcctaaatgcacagtcatgtgcctacgtcctgcctcgcaatgagggagcatgtaccccaggtacatccatgaactgcggcagcagtttgacttattgctgnttncancttaaggntgntgngttttgtttttgattangttgcttgttantaaaaaaaanttggannggagaannnnaannnannannnaaaaaagggcggccccncccnatnaggggcccnantaancttaattnacctgancttggnacncctgttganaaancccgtaatgnccccccaaacnncctctngnatttttcnnaaancncggttgcccccggnnttttttnttggggaaaatcccnnctncttggcgannttttccggnccttagggaancta

SEQ ID NO: 290 - DNA, 1393 bp, Homo Sapiens
  misc_feature (930)..(930): n is a, c, g, or t
  misc_feature (939)..(939): n is a, c, g, or t
  misc_feature (991)..(991): n is a, c, g, or t
  misc_feature (998)..(998): n is a, c, g, or t
  misc_feature (1002)..(1002): n is a, c, g, or t
  misc_feature (1026)..(1026): n is a, c, g, or t
  misc_feature (1038)..(1038): n is a, c, g, or t
  misc_feature (1041)..(1041): n is a, c, g, or t
  misc_feature (1047)..(1047): n is a, c, g, or t
  misc_feature (1054)..(1054): n is a, c, g, or t
  misc_feature (1067)..(1067): n is a, c, g, or t
  misc_feature (1070)..(1070): n is a, c, g, or t
  misc_feature (1075)..(1075): n is a, c, g, or t
  misc_feature (1077)..(1077): n is a, c, g, or t
  misc_feature (1080)..(1080): n is a, c, g, or t
  misc_feature (1094)..(1094): n is a, c, g, or t
  misc_feature (1104)..(1104): n is a, c, g, or t
  misc_feature (1108)..(1109): n is a, c, g, or t
  misc_feature (1114)..(1114): n is a, c, g, or t
  misc_feature (1123)..(1124): n is a, c, g, or t
  misc_feature (1144)..(1144): n is a, c, g, or t
  misc_feature (1155)..(1156): n is a, c, g, or t
  misc_feature (1168)..(1169): n is a, c, g, or t
  misc_feature (1172)..(1172): n is a, c, g, or t
  misc_feature (1175)..(1175): n is a, c, g, or t
  misc_feature (1177)..(1177): n is a, c, g, or t
  misc_feature (1181)..(1181): n is a, c, g, or t
  misc_feature (1183)..(1183): n is a, c, g, or t
  misc_feature (1186)..(1186): n is a, c, g, or t
  misc_feature (1193)..(1193): n is a, c, g, or t
  misc_feature (1198)..(1198): n is a, c, g, or t
  misc_feature (1201)..(1202): n is a, c, g, or t
  misc_feature (1206)..(1206): n is a, c, g, or t
  misc_feature (1210)..(1210): n is a, c, g, or t
  misc_feature (1214)..(1214): n is a, c, g, or t
  misc_feature (1221)..(1221): n is a, c, g, or t
  misc_feature (1223)..(1223): n is a, c, g, or t
  misc_feature (1230)..(1230): n is a, c, g, or t
  misc_feature (1235)..(1235): n is a, c, g, or t
  misc_feature (1238)..(1238): n is a, c, g, or t
  misc_feature (1243)..(1243): n is a, c, g, or t
  misc_feature (1245)..(1245): n is a, c, g, or t
  misc_feature (1252)..(1253): n is a, c, g, or t
  misc_feature (1261)..(1262): n is a, c, g, or t
  misc_feature (1266)..(1266): n is a, c, g, or t
  misc_feature (1268)..(1270): n is a, c, g, or t
  misc_feature (1275)..(1276): n is a, c, g, or t
  misc_feature (1279)..(1279): n is a, c, g, or t
  misc_feature (1281)..(1282): n is a, c, g, or t
  misc_feature (1284)..(1284): n is a, c, g, or t
  misc_feature (1288)..(1290): n is a, c, g, or t
  misc_feature (1292)..(1292): n is a, c, g, or t
  misc_feature (1299)..(1303): n is a, c, g, or t
  misc_feature (1308)..(1309): n is a, c, g, or t
  misc_feature (1312)..(1312): n is a, c, g, or t
  misc_feature (1314)..(1314): n is a, c, g, or t
  misc_feature (1317)..(1317): n is a, c, g, or t
  misc_feature (1323)..(1326): n is a, c, g, or t
  misc_feature (1332)..(1332): n is a, c, g, or t
  misc_feature (1335)..(1336): n is a, c, g, or t
  misc_feature (1339)..(1342): n is a, c, g, or t
  misc_feature (1344)..(1345): n is a, c, g, or t
  misc_feature (1348)..(1348): n is a, c, g, or t
  misc_feature (1354)..(1354): n is a, c, g, or t
  misc_feature (1356)..(1356): n is a, c, g, or t
  misc_feature (1358)..(1358): n is a, c, g, or t
  misc_feature (1360)..(1363): n is a, c, g, or t
  misc_feature (1365)..(1366): n is a, c, g, or t
  misc_feature (1368)..(1368): n is a, c, g, or t
  misc_feature (1372)..(1377): n is a, c, g, or t
  misc_feature (1380)..(1383): n is a, c, g, or t
  misc_feature (1390)..(1390): n is a, c, g, or t
  misc_feature (1393)..(1393): n is a, c, g, or t
caatagagagattactatgagaggatcgcatcaccatcaccatcacggatcctatttaggtgacactatagaatcgtcgacccacgcgtccgcagagctctccagagttcaagggctccctggcctccctctcagacagcttgggggtgtctgtcatggccaccgaccaggactcctactccaccagcagcacggaggaggagctggagcagttcagcagccccagcgtgaagaagaagccctccatgatcctgggcaaggctcggcaccggctgagctttgccagtttcagcagcatgttccacgctttcctctccaacaaccgcaagctgtacaagaaggtggtggagctggcgcaggacaagggctcgtactttggcagcctggtgcaggactacaaggtgtacagcctggagatgatggcgcgccagacctccagcacggagatgctgcaggagattcgcaccatgatgacccagctcaagagctacctgctgcagagcaccgagctcaaggccctggtggaccccgccctgcactccgaggaggagctcgaagcaattgtagagtctgccttgtacaaatgtgtcctgaagcccctgaaggaagccatcaactcatgcctgcatcagatccacagcaaggatggttcgctgcagcagctcaaggagaaccagttagtgatcctggccaccaccaccactgacctaggtgtgaccaccagcgtgccggaggtgcccatgatggagaagatcctgcagaagttcaccagcatgcacaaggcctactcacctgagaagaagatctccatcctgctcaagacctgcaaactcatctacgactccatggccctcggcaacccagggaagccctatgggggcggatgacttcctgcctgtgctcatgtatgtgctggccccgcaaccaacntcacggaanatgcttctcaatgtggagtacatgatggagctcatggaaccccgccctgcanctggggnaggnttctaatatctgaccaccacctangggggcctggancanatcaanaactacnaaaaaatcccggnganccgcnanttnaatggggaagtgcngattcctccnccgnnggganggccggggnnttttcaaaaaggccgggccnccccctccccnnaaagaatttttnnggntcnanctgnanccnaaaaaanggggnaanntggntccngggngaaaccnanccaaggntttgnccnatggngnaaaattnnggggaaanncccncnnnagggnnatnanntnatannnantggaccnnnnnaaaannaananccnaaaccnnnntttttnaannccnnnncnnggntttttngnancnnnntnngntttnnnnnnaannnnaaaaatnttn

SEQ ID NO: 291 - DNA, 1200 bp, Homo Sapiens
  misc_feature (813)..(813): n is a, c, g, or t
  misc_feature (823)..(823): n is a, c, g, or t
  misc_feature (847)..(847): n is a, c, g, or t
  misc_feature (855)..(855): n is a, c, g, or t
  misc_feature (873)..(873): n is a, c, g, or t
  misc_feature (880)..(880): n is a, c, g, or t
  misc_feature (885)..(885): n is a, c, g, or t
  misc_feature (905)..(905): n is a, c, g, or t
  misc_feature (928)..(928): n is a, c, g, or t
  misc_feature (939)..(940): n is a, c, g, or t
  misc_feature (971)..(972): n is a, c, g, or t
  misc_feature (987)..(987): n is a, c, g, or t
  misc_feature (994)..(994): n is a, c, g, or t
  misc_feature (1006)..(1007): n is a, c, g, or t
  misc_feature (1020)..(1020): n is a, c, g, or t
  misc_feature (1041)..(1041): n is a, c, g, or t
  misc_feature (1047)..(1048): n is a, c, g, or t
  misc_feature (1056)..(1056): n is a, c, g, or t
  misc_feature (1083)..(1084): n is a, c, g, or t
  misc_feature (1088)..(1088): n is a, c, g, or t
  misc_feature (1101)..(1101): n is a, c, g, or t
  misc_feature (1104)..(1104): n is a, c, g, or t
  misc_feature (1112)..(1112): n is a, c, g, or t
  misc_feature (1118)..(1118): n is a, c, g, or t
  misc_feature (1121)..(1121): n is a, c, g, or t
  misc_feature (1139)..(1140): n is a, c, g, or t
  misc_feature (1150)..(1150): n is a, c, g, or t
  misc_feature (1159)..(1159): n is a, c, g, or t
  misc_feature (1172)..(1173): n is a, c, g, or t
  misc_feature (1176)..(1176): n is a, c, g, or t
  misc_feature (1178)..(1178): n is a, c, g, or t
aatagagaaattactatgagaggatcgcatcaccatcaccatcacggatcctatttaggtgacactatagaatcgtcgacccacgcgtccgggaagtcagaggggcatggcgaggagtccagctctgaggactctgacattgatggcgaggcggaggacggggagcagggccccatctggacgttcccccctaccatccggccgagtccacacagcaagcttcacaaggggacggccctgcacagttcacagaagcctgcggagcccgtcaagaggcagccgaggtcccagtgcctgtccacgctggtccggcccgtcttcggagagctcaaagagaagcacaagcagagcggcgggagcgtgggtgcgctggaggagctggagaacgccttcagcctggccgaggagtcctgccccggcatctcagacaagctgatggtgcacctggtggagcgagtgcagaggttttcacacaacagaaaccacctgacatccacccgctgaagcgcactgctgttcagataggggacggaaggtcgtttgtttttgttctgagctccataagaactgtgctgacttggaaggtgccctgtgctatgtcgtgcctgcagggacacgtcggatcccgtgggcctcacatgccaggtcaccaggtcaccgtctccttccacccctgcagtgtgctgttgtgcacgtcagggacgctgttctctatgcccactgccctcctccctctcctggcccagcagtattgctcacgggggctccagccgccggcgtggccctcatgagctacgcctgggtcttctgcanactcatgcancccctatggccgctcaaaaccaangcgcaaancaactatcagggcagctnttgcctncctcntcccatgaaggtgggggaanaggcaacaggggccaaccccccnaaagaattgtnntggcccgcttgttccttcccggggcccatgnntggccataaaatttncccttgngggtgtttgganncagggtacttggnttttgcccaaaaaatactttngttcannccaaaatntttttttttttttaaaaaaattaaatnntttnttttccttaaaanttntgaaggtnaaatgnttnatttttttaaaaaaattnnaaagcccctngcccctttnaaaaaaaacctgnnttngnaaaaaaaaaaaaaagggggccc

SEQ ID NO: 292 - DNA, 1200 bp, Homo Sapiens
  misc_feature (760)..(760): n is a, c, g, or t
  misc_feature (825)..(825): n is a, c, g, or t
  misc_feature (892)..(892): n is a, c, g, or t
  misc_feature (906)..(906): n is a, c, g, or t
  misc_feature (950)..(950): n is a, c, g, or t
  misc_feature (963)..(963): n is a, c, g, or t
  misc_feature (975)..(975): n is a, c, g, or t
  misc_feature (977)..(977): n is a, c, g, or t
  misc_feature (979)..(979): n is a, c, g, or t
  misc_feature (983)..(984): n is a, c, g, or t
  misc_feature (1004)..(1004): n is a, c, g, or t
  misc_feature (1024)..(1024): n is a, c, g, or t
  misc_feature (1039)..(1039): n is a, c, g, or t
  misc_feature (1043)..(1043): n is a, c, g, or t
  misc_feature (1062)..(1062): n is a, c, g, or t
  misc_feature (1067)..(1067): n is a, c, g, or t
  misc_feature (1073)..(1073): n is a, c, g, or t
  misc_feature (1088)..(1088): n is a, c, g, or t
  misc_feature (1091)..(1091): n is a, c, g, or t
  misc_feature (1094)..(1094): n is a, c, g, or t
  misc_feature (1098)..(1102): n is a, c, g, or t
  misc_feature (1104)..(1104): n is a, c, g, or t
  misc_feature (1106)..(1114): n is a, c, g, or t
  misc_feature (1116)..(1116): n is a, c, g, or t
  misc_feature (1119)..(1125): n is a, c, g, or t
  misc_feature (1128)..(1129): n is a, c, g, or t
  misc_feature (1131)..(1137): n is a, c, g, or t
  misc_feature (1139)..(1141): n is a, c, g, or t
  misc_feature (1143)..(1143): n is a, c, g, or t
  misc_feature (1146)..(1147): n is a, c, g, or t
  misc_feature (1149)..(1154): n is a, c, g, or t
  misc_feature (1161)..(1162): n is a, c, g, or t
  misc_feature (1171)..(1171): n is a, c, g, or t
  misc_feature (1186)..(1186): n is a, c, g, or t
  misc_feature (1195)..(1196): n is a, c, g, or t
aatagagaaattactatgagaggatcgcatcaccatcaccatcacggatcctatttaggtgacactatagaatcgtcgacccacgcgtccggacagaaaaatggtttcctaggctgctgctattctgtgcagtgtcagaacatgttcgcctgtgtcccagtgacttcagcttcagctgtggctgaaagaggccaaggcacagctcagacccttgcttctaagggtgtaaaccctaagccttgcagtttcccacatggtgtttggcctgttggtgcatagaagtcaaaaatcgaggtttgagaacctccacctagatttcggaggatgtatggaaatgcctggatatccaggcagaattttgctggagaggcagagccctaacagagaacctctgctaaggcagtgcagaagggaaatgttgggtcagaactcccacacagagtccccactggggcactgcctagtggagcagtgagaagagggccaccatcctccagaccccagaatggtagatccaccaacagcttgcactatgcatctggaaaagctgcagacagtcaacaccatcctatgaaagcagtggaaagtggggctatatcttgcaaagccacagaggcggggctgcccaaggccatgggtgcccatctcttgcatcagcatgacctggatgtgtgacatgaagtcaagggagatcattttggagctttaagatctggctgccctgctgaattttggacttgcatgaggcctgtagccctgnttgttttggccaatttctcccaattggaatgggtatattttttctattgcctgtaccccccattngtatctaggaaagtaactaacttgctttttgattttacagtctcgtaggtagaaagaaactgctttntctcaaatgagacntttggactgtgggactttttgagttaacccttgaaaataaggcntttgggagactgntaaaaaaaggcntnanctgnnggtttgaaattgtgaggacnttgaaaatttgggaagtggntggaatggaaacatngaanctaacctttttaaaaaatnggaantcctancaaaaaaaaaaaaanaanaanaaannnnntntnnnnnnnnnantcnnnnnnnaanntnnnnnnnannnanttnnannnnnntgggggnngccccccanaaggggccaaaaaancttattacnnaact

SEQ ID NO: 293 - DNA, 1205 bp, Homo Sapiens
  misc_feature (815)..(815): n is a, c, g, or t
  misc_feature (858)..(858): n is a, c, g, or t
  misc_feature (871)..(871): n is a, c, g, or t
  misc_feature (903)..(903): n is a, c, g, or t
  misc_feature (921)..(921): n is a, c, g, or t
  misc_feature (924)..(924): n is a, c, g, or t
  misc_feature (933)..(933): n is a, c, g, or t
  misc_feature (951)..(951): n is a, c, g, or t
  misc_feature (954)..(954): n is a, c, g, or t
  misc_feature (968)..(968): n is a, c, g, or t
  misc_feature (971)..(971): n is a, c, g, or t
  misc_feature (976)..(976): n is a, c, g, or t
  misc_feature (978)..(978): n is a, c, g, or t
  misc_feature (998)..(998): n is a, c, g, or t
  misc_feature (1004)..(1004): n is a, c, g, or t
  misc_feature (1010)..(1010): n is a, c, g, or t
  misc_feature (1013)..(1013): n is a, c, g, or t
  misc_feature (1026)..(1026): n is a, c, g, or t
  misc_feature (1032)..(1032): n is a, c, g, or t
  misc_feature (1040)..(1040): n is a, c, g, or t
  misc_feature (1043)..(1043): n is a, c, g, or t
  misc_feature (1051)..(1051): n is a, c, g, or t
  misc_feature (1058)..(1058): n is a, c, g, or t
  misc_feature (1061)..(1061): n is a, c, g, or t
  misc_feature (1064)..(1064): n is a, c, g, or t
  misc_feature (1077)..(1077): n is a, c, g, or t
  misc_feature (1092)..(1092): n is a, c, g, or t
  misc_feature (1097)..(1099): n is a, c, g, or t
  misc_feature (1104)..(1104): n is a, c, g, or t
  misc_feature (1110)..(1110): n is a, c, g, or t
  misc_feature (1115)..(1115): n is a, c, g, or t
  misc_feature (1122)..(1123): n is a, c, g, or t
  misc_feature (1134)..(1134): n is a, c, g, or t
  misc_feature (1136)..(1136): n is a, c, g, or t
  misc_feature (1143)..(1143): n is a, c, g, or t
  misc_feature (1151)..(1152): n is a, c, g, or t
  misc_feature (1155)..(1157): n is a, c, g, or t
  misc_feature (1161)..(1161): n is a, c, g, or t
  misc_feature (1167)..(1167): n is a, c, g, or t
  misc_feature (1169)..(1169): n is a, c, g, or t
  misc_feature (1172)..(1172): n is a, c, g, or t
  misc_feature (1174)..(1174): n is a, c, g, or t
  misc_feature (1177)..(1178): n is a, c, g, or t
  misc_feature (1181)..(1183): n is a, c, g, or t
  misc_feature (1192)..(1192): n is a, c, g, or t
  misc_feature (1196)..(1197): n is a, c, g, or t
  misc_feature (1202)..(1202): n is a, c, g, or t
gagaaattactatgagaggatcgcatcaccatcaccatcacggatcctatttaggtgacactatagaatcgtcgacccacgcgtccgcggacgcgtgggtgccagtgggcacgcaggccaccatgaagggcatcacgaccgaacagctggacgctctgggttgccgcatctgcctgggcaatacctaccatctgggtctaaggccggtgggtgggctctgcccgcgcggggaggcggcgaggcggcgaggcgtggggagccatggagcgtcctccaggcccggacactcctcccaaagtcaatcgaccagctgtattgagcgcccccaatgaccaggccttgtactgggcgtgaaagagcagcagggactaaagctggccagatctgtctcccaagaagggcccccagggacgcggtcacccctaacctgacactttcttccatcaacccagggacccgagctgatccagaaagccaacggtctccacggcttcatgaattggcctcataatctgctaacggacagcggcggtttccagatggtgtcgctggtgtctctgtccgaggtgacggaggagggcgtccgcttccgctccccctacgacggcaatgagaccctgctgagcccggagaaatccgtgcagatccagaatgcgctgggctcggacatcatcatgcagctggacgacgtggttagcagtactgtgactgggccacgtgtggaggaggccatgtacaggtcaatccgctggctggaccggtgcattgcagcccatcagcggccggacaagcaaaacctcttcgccattatccanggtgggctggacgcaaatctccgggccacctgccttgaaaaanatgaccaagcganacgtgcctggcttccccatcgggggcctgacnggggtgaaaaacaagtcncanttctggcgnatggtggcgctgaacacntcncggctgccaagaanaanccccnanatctgatggggttgggtatnttttgnaaaagnaancaaaaaccctacntgtggnaaatgganttntgggggancccctanccntgnttggggaggtggnttttgggggaaaaangaaannnggttnttaatntgaanaaaaaannaaaaaatgggntntcccttngggggccnnttnnnaggnaaaatngnccnanttnnggnnnattttaaantttnnaaagnccc

SEQ ID NO: 294 - DNA, 1197 bp, Homo Sapiens
  misc_feature (1)..(1): n is a, c, g, or t
  misc_feature (89)..(89): n is a, c, g, or t
  misc_feature (932)..(932): n is a, c, g, or t
  misc_feature (957)..(957): n is a, c, g, or t
  misc_feature (959)..(959): n is a, c, g, or t
  misc_feature (984)..(984): n is a, c, g, or t
  misc_feature (1005)..(1005): n is a, c, g, or t
  misc_feature (1021)..(1021): n is a, c, g, or t
  misc_feature (1038)..(1038): n is a, c, g, or t
  misc_feature (1042)..(1042): n is a, c, g, or t
  misc_feature (1055)..(1055): n is a, c, g, or t
  misc_feature (1057)..(1057): n is a, c, g, or t
  misc_feature (1066)..(1066): n is a, c, g, or t
  misc_feature (1093)..(1093): n is a, c, g, or t
  misc_feature (1111)..(1111): n is a, c, g, or t
  misc_feature (1118)..(1119): n is a, c, g, or t
  misc_feature (1125)..(1125): n is a, c, g, or t
  misc_feature (1128)..(1128): n is a, c, g, or t
  misc_feature (1134)..(1134): n is a, c, g, or t
  misc_feature (1136)..(1136): n is a, c, g, or t
  misc_feature (1141)..(1141): n is a, c, g, or t
  misc_feature (1154)..(1154): n is a, c, g, or t
  misc_feature (1184)..(1184): n is a, c, g, or t
  misc_feature (1187)..(1187): n is a, c, g, or t
  misc_feature (1189)..(1189): n is a, c, g, or t
  misc_feature (1197)..(1197): n is a, c, g, or t
naatagagaaaattactatgagaggatgcatcaccatcaccatcacggatcctatttaggtgacactatagaatcgtcgacccacgcgntccgccccatcctactatgacaaccaggacttccctgccaccaactgggatgacaagagcatccgacaggccttcatccgcaaggtgttcctagtgctgaccttgcagctgtcggtgaccctgtccacggtgtctgtgttcacttttgttgcggaggtgaagggccttgtccgggagaatgtctggacctactatgtctcctatgctgtcttcttcatctctctcatcgtcctcagctgttgtggggacttccggcgaaagcacccctggaaccttgttgcactgtcggtcctgaccgccagcctgtcgtacatggtggggatgatcgccagcttctacaacaccgaggcagtcatcatggccgtgggcatcaccacagccgtctgcttcaccgtcgtcatcttctccatgcagacccgctacgacttcacctcatgcatgggcgtgctcctggtgagcatggtggtgctcttcatcttcgccattctctgcatcttcatccggaaccgcatcctggagatcgtgtacgcctcactgggcgctctgctcttcacctgcttcctcgcagtggacacccagctgctgctggggaacaagcagctgtccctgagcccagaagagtatgtgtttgctgcgctgaacctgtacacagacatcatcaacatcttcctgtacatcctcaccatcattggccgcgccaaggagtagccgagctccagctcgctgtgcccgctcaggtggcacggctggcctggaccctgcccctggcacggcagtgcccagctgtacttcccctctctcttgtccccaggcacagcctaaggaaaaggatgcctctctccnaacccctcctgtatgtacactgcananacttccattttggaccccctgtggnccacagcatggccccctttantccctccccccccccncccaagggggcaccaanggcnacgttttccgtgncnacctcctgntctactcattgttgcaagaacccctgntttgccaaccccaccccnagggaanngggggncancaccangntcccnggggaaaaggganttgaacccaaaaagggggaggggggccccntcntncccccccn

SEQ ID NO: 295 - DNA, 1294 bp, Homo Sapiens
  misc_feature (969)..(969): n is a, c, g, or t
  misc_feature (1018)..(1018): n is a, c, g, or t
  misc_feature (1028)..(1028): n is a, c, g, or t
  misc_feature (1072)..(1072): n is a, c, g, or t
  misc_feature (1074)..(1074): n is a, c, g, or t
  misc_feature (1103)..(1103): n is a, c, g, or t
  misc_feature (1110)..(1110): n is a, c, g, or t
  misc_feature (1120)..(1120): n is a, c, g, or t
  misc_feature (1122)..(1122): n is a, c, g, or t
  misc_feature (1125)..(1126): n is a, c, g, or t
  misc_feature (1141)..(1141): n is a, c, g, or t
  misc_feature (1145)..(1145): n is a, c, g, or t
  misc_feature (1154)..(1154): n is a, c, g, or t
  misc_feature (1159)..(1159): n is a, c, g, or t
  misc_feature (1172)..(1172): n is a, c, g, or t
  misc_feature (1178)..(1178): n is a, c, g, or t
  misc_feature (1185)..(1185): n is a, c, g, or t
  misc_feature (1189)..(1190): n is a, c, g, or t
  misc_feature (1193)..(1193): n is a, c, g, or t
  misc_feature (1196)..(1196): n is a, c, g, or t
  misc_feature (1203)..(1203): n is a, c, g, or t
  misc_feature (1205)..(1206): n is a, c, g, or t
  misc_feature (1208)..(1210): n is a, c, g, or t
  misc_feature (1215)..(1215): n is a, c, g, or t
  misc_feature (1224)..(1224): n is a, c, g, or t
  misc_feature (1227)..(1227): n is a, c, g, or t
  misc_feature (1232)..(1232): n is a, c, g, or t
  misc_feature (1236)..(1236): n is a, c, g, or t
  misc_feature (1258)..(1258): n is a, c, g, or t
  misc_feature (1260)..(1262): n is a, c, g, or t
  misc_feature (1266)..(1266): n is a, c, g, or t
  misc_feature (1269)..(1269): n is a, c, g, or t
  misc_feature (1272)..(1272): n is a, c, g, or t
  misc_feature (1279)..(1279): n is a, c, g, or t
tagagaaattaactatgagaggatcgcatcaccatcaccatcacggatcctatttaggtgacactatagaatcgtcgacccacgcgtccgcgcactctgttcttccgccgctccgccgtcgcgtttctctgccggtcgcaatggaagaagagatcgccgcgctggtcattgacaatggctccggcatgtgcaaagctggttttgctggggacgacgctccccgagccgtgtttccttccatcgtcgggcgccccagacaccagggcgtcatggtgggcatgggccagaaggactcctacgtgggcgacgaggcccagagcaagcgtggcatcctgaccctgaagtaccccattgagcatggcatcgtcaccaactgggacgacatggagaagatctggcaccacaccttctacaacgagctgcgcgtggccccggaggagcacccagtgctgctgaccgaggcccccctgaaccccaaggccaacagagagaagatgactcagattatgtttgagaccttcaacaccccggccatgtacgtggccatccaggccgtgctgtccctctacgcctctgggcgcaccactggcattgtcatggactctggagacggggtcacccacacggtgcccatctacgagggctacgccctcccccacgccatcctgcgtctggacctggctggccgggacctgaccgactacctcatgaagatcctcactgagcgaggctacagcttcaccaccacggccgagcgggaaatcgtgcgcgacatcaaggagaagctgtgctacgtcgccctggacttcgagcaggagatggccaccgccgcatcctcctcttctctggagaagagctacgagctgcccgatggccaggtcatcaccattggcaatgagcggttccggtgtccggaggcgctgtttccagccttccttcctgggtatggaatcttgcggcatccacganaccaccttcaactccatcatgaagtgtgacgtggacatccgcaaaaacntgtacgccancacggtgctgtcgggcggcaccaccatgtatccgggcattgccnanaggatgcaaaaggaaatcccgccctggcncccaccncctgaaaatnanatnntcccacccccaaacncaantacccgggnggatngggggtccatccnggcctnctgtccncttnnccnaanggggatntnnannnggaanaaaaaaatnggnccccncttnccccccaaattttttaaaggantnnnaaanggnaantttttgnggggtaataaaaaaa

SEQ ID NO: 296 - DNA, 1285 bp, Homo Sapiens
  misc_feature (855)..(855): n is a, c, g, or t
  misc_feature (916)..(916): n is a, c, g, or t
  misc_feature (927)..(927): n is a, c, g, or t
  misc_feature (968)..(968): n is a, c, g, or t
  misc_feature (974)..(974): n is a, c, g, or t
  misc_feature (992)..(992): n is a, c, g, or t
  misc_feature (1004)..(1004): n is a, c, g, or t
  misc_feature (1014)..(1014): n is a, c, g, or t
  misc_feature (1018)..(1018): n is a, c, g, or t
  misc_feature (1072)..(1072): n is a, c, g, or t
  misc_feature (1074)..(1074): n is a, c, g, or t
  misc_feature (1092)..(1092): n is a, c, g, or t
  misc_feature (1108)..(1108): n is a, c, g, or t
  misc_feature (1111)..(1111): n is a, c, g, or t
  misc_feature (1131)..(1131): n is a, c, g, or t
  misc_feature (1140)..(1140): n is a, c, g, or t
  misc_feature (1144)..(1144): n is a, c, g, or t
  misc_feature (1158)..(1158): n is a, c, g, or t
  misc_feature (1163)..(1163): n is a, c, g, or t
  misc_feature (1167)..(1167): n is a, c, g, or t
  misc_feature (1173)..(1173): n is a, c, g, or t
  misc_feature (1183)..(1183): n is a, c, g, or t
  misc_feature (1185)..(1185): n is a, c, g, or t
  misc_feature (1187)..(1187): n is a, c, g, or t
  misc_feature (1193)..(1193): n is a, c, g, or t
  misc_feature (1197)..(1197): n is a, c, g, or t
  misc_feature (1204)..(1204): n is a, c, g, or t
  misc_feature (1211)..(1211): n is a, c, g, or t
  misc_feature (1218)..(1218): n is a, c, g, or t
  misc_feature (1221)..(1221): n is a, c, g, or t
  misc_feature (1227)..(1227): n is a, c, g, or t
  misc_feature (1230)..(1230): n is a, c, g, or t
  misc_feature (1233)..(1233): n is a, c, g, or t
  misc_feature (1235)..(1236): n is a, c, g, or t
  misc_feature (1252)..(1252): n is a, c, g, or t
  misc_feature (1254)..(1254): n is a, c, g, or t
  misc_feature (1259)..(1260): n is a, c, g, or t
  misc_feature (1266)..(1266): n is a, c, g, or t
  misc_feature (1269)..(1269): n is a, c, g, or t
tagagaaattactatgagaggatcgcatcaccatcaccatcacggatcctatttaggtgacactatagaatcgtcgacccacgcgtccgcgcactctgttcttccgccgctccgccgtcgcgtttctctgccggtcgcaatggaagaagagatcgccgcgctggtcattgacaatggctccggcatgtgcaaagctggttttgctggggacgacgctccccgagccgtgtttccttccatcgtcgggcgccccagacaccagggcgtcatggtgggcatgggccagaaggactcctacgtgggcgacgaggcccagagcaagcgtggcatcctgaccctgaagtaccccattgagcatggcatcgtcaccaactgggacgacatggagaagatctggcaccacaccttctacaacgagctgcgcgtggccccggaggagcacccagtgctgctgaccgaggcccccctgaaccccaaggccaacagagagaagatgactcagattatgtttgagaccttcaacaccccggccatgtacgtggccatccaggccgtgctgtccctctacgcctctgggcgcaccactggcattgtcatggactctggagacggggtcacccacacggtgcccatctacgagggctacgccctcccccacgccatcctgcgtctggacctggctggccgggacctgaccgactacctcatgaagatcctcactgagcgaggctacagcttcaccaccacggccgagcgggaaatcgtgcgcgacatcaaggagaagctgtgctacgtcgccctggacttcgagcaggagatggccaccgccgcatcctcctcttctctggagaaganctacgagctgcccgatggccaggtcatcaccattggcaatgagcggttccggtgtccggangcgctgtttcnagccttccttcctgggtatggaatcttgcggcatccacganaccacnttcaactccatcatgaantgtgacgtgganatccgcaaanaacntgtacgccaacacggtgctgtcgggcggcaccaccatgtatccgggcattgccnanaggatgcaaaaggaaatnaccgccctggcgcccngcncctgaaaatcaaatttcccnccccaaacncaanactcgggggggatnggggntccntctggnctcatttccncntncacaangggnttacaancggattnaaaaatnggnccctcnttntcncnnaaagttttaaggatcncnaaagnnaatttntgnggggtaataaaaaaaa

SEQ ID NO: 297 - DNA, 1107 bp, Homo Sapiens
  misc_feature (744)..(744): n is a, c, g, or t
  misc_feature (777)..(777): n is a, c, g, or t
  misc_feature (780)..(780): n is a, c, g, or t
  misc_feature (906)..(906): n is a, c, g, or t
  misc_feature (943)..(943): n is a, c, g, or t
  misc_feature (986)..(987): n is a, c, g, or t
  misc_feature (998)..(998): n is a, c, g, or t
  misc_feature (1009)..(1009): n is a, c, g, or t
  misc_feature (1013)..(1013): n is a, c, g, or t
  misc_feature (1019)..(1019): n is a, c, g, or t
  misc_feature (1038)..(1038): n is a, c, g, or t
  misc_feature (1041)..(1041): n is a, c, g, or t
  misc_feature (1047)..(1047): n is a, c, g, or t
  misc_feature (1052)..(1052): n is a, c, g, or t
  misc_feature (1060)..(1060): n is a, c, g, or t
  misc_feature (1063)..(1107): n is a, c, g, or t
atagagaaattactatgagaggatcgcatcaccatcaccatcacggatcctatttaggtgacactatagaatcgtcgacccacgcgtccggtgtcggccaccatgagcggggtcaccacctgcctgcgcttcccgggccagctgaacgcagacctgcgcaagctggcggtgaacatggtgcccttccctcgcctgcacttcttcatgcccggcttcgcgcccctgaccagccggggcagccagcagtaccgggcgctcacggtgcccgagctcacccagcagatgttcgactccaagaacatgatggccgcctgcgacccgcgccacggccgctacctgacggtggctgccatcttccggggccgcatgtccatgaaggaggtggacgagcagatgctcaacgtgcagaacaagaacagcagctacttcgtggagtggatccccaacaacgtgaagacggccgtgtgcgacatcccgccccgcggcctgaagatgtcggccaccttcatcggcaacagcacggccatccaggagctgttcaagcgcatctccgagcagttcacggccatgttccggcgcaaggccttcctgcactggtacacgggcgagggcatggacgagatggagttcaccgaggccgagagcaacatgaacgacctggtgtccgagtaccagcagtaccaggacgccacggccgacgaacaaggggagttcgaggaggaggagggcgaggacgaggcgtanatgcccccgcgagacgggttagggaaagcggangangaaagcgagggggtggggggcttcccgggacgataacctggcagtggaaggaaagaagcatggtctactttaggtgtgcgctgggtctctggtgctcttcactgttgcctgtcactttttttttcntttttgtaatattgatgacatcaatgtaacatttganatatttctgaattactggttgtaatggctaaaatcacataaanngtttgtgtcgnaatgggggccncccnttcccntcctttttcccttaataanganttaaanggaantttttganccnnnnnnnnnnnnnnnnnnnnnnnnnnnnnnnnnnnnnnnnnnnnn

SEQ ID NO: 298 - DNA, 1104 bp, Homo Sapiens
  misc_feature (743)..(743): n is a, c, g, or t
  misc_feature (776)..(776): n is a, c, g, or t
  misc_feature (779)..(779): n is a, c, g, or t
  misc_feature (905)..(905): n is a, c, g, or t
  misc_feature (912)..(912): n is a, c, g, or t
  misc_feature (940)..(940): n is a, c, g, or t
  misc_feature (943)..(943): n is a, c, g, or t
  misc_feature (956)..(956): n is a, c, g, or t
  misc_feature (961)..(961): n is a, c, g, or t
  misc_feature (978)..(979): n is a, c, g, or t
  misc_feature (993)..(994): n is a, c, g, or t
  misc_feature (997)..(997): n is a, c, g, or t
  misc_feature (1034)..(1034): n is a, c, g, or t
  misc_feature (1042)..(1042): n is a, c, g, or t
  misc_feature (1053)..(1053): n is a, c, g, or t
  misc_feature (1058)..(1104): n is a, c, g, or t
tagagaaattactatgagaggatcgcatcaccatcaccatcacggatcctatttaggtgacactatagaatcgtcgacccacgcgtccggtgtcggccaccatgagcggggtcaccacctgcctgcgcttcccgggccagctgaacgcagacctgcgcaagctggcggtgaacatggtgcccttccctcgcctgcacttcttcatgcccggcttcgcgcccctgaccagccggggcagccagcagtaccgggcgctcacggtgcccgagctcacccagcagatgttcgactccaagaacatgatggccgcctgcgacccgcgccacggccgctacctgacggtggctgccatcttccggggccgcatgtccatgaaggaggtggacgagcagatgctcaacgtgcagaacaagaacagcagctacttcgtggagtggatccccaacaacgtgaagacggccgtgtgcgacatcccgccccgcggcctgaagatgtcggccaccttcatcggcaacagcacggccatccaggagctgttcaagcgcatctccgagcagttcacggccatgttccggcgcaaggccttcctgcactggtacacgggcgagggcatggacgagatggagttcaccgaggccgagagcaacatgaacgacctggtgtccgagtaccagcagtaccaggacgccacggccgacgaacaaggggagttcgaggaggaggagggcgaggacgaggcgtanatgcccccgcgagacgggttagggaaagcggangangaaagcgagggggtggggggcttcccgggacgataacctggcagtggaaggaaagaagcatggtctactttaggtgtgcgctgggtctctggtgctcttcactgttgcctgtcacttttttttccntttttgnaatattgatgacatcaatgtaacatttnganatatttctgaatnactgntgtatggctaaaatcanntaacgtttgtgtcnnaanggggcccccctttcccttccttttcccttaataacanttaaatgnaatttttgaanccaannnnnnnnnnnnnnnnnnnnnnnnnnnnnnnnnnnnnnnnnnnnnnn

SEQ ID NO: 299 - DNA, 1375 bp, Homo Sapiens
  misc_feature (897)..(897): n is a, c, g, or t
  misc_feature (910)..(910): n is a, c, g, or t
  misc_feature (917)..(917): n is a, c, g, or t
  misc_feature (932)..(932): n is a, c, g, or t
  misc_feature (943)..(943): n is a, c, g, or t
  misc_feature (952)..(952): n is a, c, g, or t
  misc_feature (963)..(963): n is a, c, g, or t
  misc_feature (966)..(966): n is a, c, g, or t
  misc_feature (984)..(984): n is a, c, g, or t
  misc_feature (990)..(990): n is a, c, g, or t
  misc_feature (1000)..(1000): n is a, c, g, or t
  misc_feature (1002)..(1002): n is a, c, g, or t
  misc_feature (1004)..(1004): n is a, c, g, or t
  misc_feature (1013)..(1013): n is a, c, g, or t
  misc_feature (1018)..(1019): n is a, c, g, or t
  misc_feature (1025)..(1025): n is a, c, g, or t
  misc_feature (1031)..(1031): n is a, c, g, or t
  misc_feature (1033)..(1033): n is a, c, g, or t
  misc_feature (1037)..(1037): n is a, c, g, or t
  misc_feature (1042)..(1042): n is a, c, g, or t
  misc_feature (1046)..(1046): n is a, c, g, or t
  misc_feature (1053)..(1053): n is a, c, g, or t
  misc_feature (1060)..(1060): n is a, c, g, or t
  misc_feature (1062)..(1062): n is a, c, g, or t
  misc_feature (1066)..(1066): n is a, c, g, or t
  misc_feature (1075)..(1075): n is a, c, g, or t
  misc_feature (1078)..(1078): n is a, c, g, or t
  misc_feature (1093)..(1093): n is a, c, g, or t
  misc_feature (1109)..(1109): n is a, c, g, or t
  misc_feature (1112)..(1112): n is a, c, g, or t
  misc_feature (1117)..(1117): n is a, c, g, or t
  misc_feature (1123)..(1123): n is a, c, g, or t
  misc_feature (1126)..(1127): n is a, c, g, or t
  misc_feature (1145)..(1145): n is a, c, g, or t
  misc_feature (1147)..(1148): n is a, c, g, or t
  misc_feature (1152)..(1154): n is a, c, g, or t
  misc_feature (1156)..(1157): n is a, c, g, or t
  misc_feature (1163)..(1163): n is a, c, g, or t
  misc_feature (1167)..(1169): n is a, c, g, or t
  misc_feature (1183)..(1183): n is a, c, g, or t
  misc_feature (1187)..(1187): n is a, c, g, or t
  misc_feature (1193)..(1194): n is a, c, g, or t
  misc_feature (1208)..(1208): n is a, c, g, or t
  misc_feature (1217)..(1217): n is a, c, g, or t
  misc_feature (1220)..(1222): n is a, c, g, or t
  misc_feature (1224)..(1224): n is a, c, g, or t
  misc_feature (1232)..(1232): n is a, c, g, or t
  misc_feature (1237)..(1237): n is a, c, g, or t
  misc_feature (1242)..(1242): n is a, c, g, or t
  misc_feature (1246)..(1246): n is a, c, g, or t
  misc_feature (1252)..(1252): n is a, c, g, or t
  misc_feature (1257)..(1260): n is a, c, g, or t
  misc_feature (1264)..(1264): n is a, c, g, or t
  misc_feature (1270)..(1270): n is a, c, g, or t
  misc_feature (1273)..(1274): n is a, c, g, or t
  misc_feature (1283)..(1285): n is a, c, g, or t
  misc_feature (1291)..(1291): n is a, c, g, or t
  misc_feature (1300)..(1300): n is a, c, g, or t
  misc_feature (1302)..(1302): n is a, c, g, or t
  misc_feature (1308)..(1308): n is a, c, g, or t
  misc_feature (1315)..(1315): n is a, c, g, or t
  misc_feature (1326)..(1326): n is a, c, g, or t
  misc_feature (1330)..(1330): n is a, c, g, or t
  misc_feature (1334)..(1334): n is a, c, g, or t
  misc_feature (1336)..(1337): n is a, c, g, or t
  misc_feature (1340)..(1340): n is a, c, g, or t
  misc_feature (1347)..(1347): n is a, c, g, or t
  misc_feature (1349)..(1350): n is a, c, g, or t
  misc_feature (1353)..(1353): n is a, c, g, or t
  misc_feature (1356)..(1357): n is a, c, g, or t
  misc_feature (1359)..(1359): n is a, c, g, or t
  misc_feature (1363)..(1363): n is a, c, g, or t
  misc_feature (1367)..(1369): n is a, c, g, or t
  misc_feature (1374)..(1374): n is a, c, g, or t
atagagaaattactatgagaggatcgcatcaccatcaccatcacggatcctatttaggtgacactatagaatcgtcgacccacgcgtccgggaactcctgcaataacttcatctatggaggctgccggggcaataagaacagctaccgctctgaggaggcctgcatgctccgctgcttccgctgtgtgttctcttccaggccagcaggagaatcctcccctgccccttggctcaaaggtggtggttctggcggggctgttcgtgatggtgttgatcctcttcctgggagcctccatggtctacctgatccgggtggcacggaggaaccaggagcgtgccctgcgcaccgtctggagctccggagatgacaaggagcagctggtgaagaacacatatgtcctgtgaccgccctgtcgccaagaggactggggaagggaggggagactatgtgtgagctttttttaaatagagggattgactcggatttgagtgatcattagggctgaggtctgtttctctgggaggtaggacggctgcttcctggtctggcagggatgggtttgctttggaaatcctctaggaggctcctcctcgcatggcctgcagtctggcagcagccccgagttgtttcctcgctgatcgatttctttcctccaggtagagttttctttgcttatgttgaattccattgcctcttttctcatcacagaagtgatgttggaatcgtttcttttgtttgtctgatttatggtttttttaagtataaacaaaagttttttattagcattctgaaagaaggaaagtaaaatgtacaagtttaataaaaaggggccttcccctttagaataaatttcagcatgtgctttcaaaaaaaaaaaaaaaaaaaaaaaagggcgnccgctccctatantgagtcntataagcttaattanctgaactttgnactcctgtngaaaaatccantantgacccccaaactccatntggaanttgttcaaancncncggttgccnccggnntttttnattggngnaaanccaanctancttggcnaaatttncngganctaaggaanctnaaatggaaaaaaaanccctggaaataccccnttnaattntccaanggnntccaaaaaaaattttgangnnttcnnncnntgccanggannnaaaaacaaccttcnctgnaattanngctttttaaaaacnaaaaaaaanaannnantttttccnctttnttatntttncccccnaaaannnncccnaaattntannaaaaaaaannnaccggnaagaaaaantncctttnacctttnaaaaaaaaaantttncccngnnaanaaaaatncnnttnaanntnaaangggnnnaaaanc

SEQ ID NO: 300 - DNA, 1429 bp, Homo Sapiens
  misc_feature (955)..(955): n is a, c, g, or t
  misc_feature (962)..(962): n is a, c, g, or t
  misc_feature (989)..(989): n is a, c, g, or t
  misc_feature (993)..(993): n is a, c, g, or t
  misc_feature (1000)..(1000): n is a, c, g, or t
  misc_feature (1003)..(1003): n is a, c, g, or t
  misc_feature (1010)..(1010): n is a, c, g, or t
  misc_feature (1014)..(1014): n is a, c, g, or t
  misc_feature (1018)..(1018): n is a, c, g, or t
  misc_feature (1034)..(1034): n is a, c, g, or t
  misc_feature (1043)..(1043): n is a, c, g, or t
  misc_feature (1059)..(1059): n is a, c, g, or t
  misc_feature (1068)..(1068): n is a, c, g, or t
  misc_feature (1074)..(1074): n is a, c, g, or t
  misc_feature (1083)..(1083): n is a, c, g, or t
  misc_feature (1092)..(1092): n is a, c, g, or t
  misc_feature (1105)..(1105): n is a, c, g, or t
  misc_feature (1111)..(1111): n is a, c, g, or t
  misc_feature (1115)..(1115): n is a, c, g, or t
  misc_feature (1127)..(1127): n is a, c, g, or t
  misc_feature (1130)..(1131): n is a, c, g, or t
  misc_feature (1133)..(1133): n is a, c, g, or t
  misc_feature (1136)..(1136): n is a, c, g, or t
  misc_feature (1138)..(1138): n is a, c, g, or t
  misc_feature (1144)..(1145): n is a, c, g, or t
  misc_feature (1149)..(1149): n is a, c, g, or t
  misc_feature (1156)..(1156): n is a, c, g, or t
  misc_feature (1158)..(1158): n is a, c, g, or t
  misc_feature (1160)..(1160): n is a, c, g, or t
  misc_feature (1170)..(1170): n is a, c, g, or t
  misc_feature (1177)..(1177): n is a, c, g, or t
  misc_feature (1179)..(1180): n is a, c, g, or t
  misc_feature (1198)..(1198): n is a, c, g, or t
  misc_feature (1200)..(1200): n is a, c, g, or t
  misc_feature (1213)..(1213): n is a, c, g, or t
  misc_feature (1216)..(1218): n is a, c, g, or t
  misc_feature (1225)..(1225): n is a, c, g, or t
  misc_feature (1227)..(1227): n is a, c, g, or t
  misc_feature (1231)..(1231): n is a, c, g, or t
  misc_feature (1243)..(1245): n is a, c, g, or t
  misc_feature (1252)..(1252): n is a, c, g, or t
  misc_feature (1255)..(1255): n is a, c, g, or t
  misc_feature (1257)..(1257): n is a, c, g, or t
  misc_feature (1260)..(1260): n is a, c, g, or t
  misc_feature (1271)..(1272): n is a, c, g, or t
  misc_feature (1274)..(1274): n is a, c, g, or t
  misc_feature (1277)..(1277): n is a, c, g, or t
  misc_feature (1285)..(1286): n is a, c, g, or t
  misc_feature (1289)..(1289): n is a, c, g, or t
  misc_feature (1291)..(1291): n is a, c, g, or t
  misc_feature (1300)..(1300): n is a, c, g, or t
  misc_feature (1304)..(1305): n is a, c, g, or t
  misc_feature (1317)..(1317): n is a, c, g, or t
  misc_feature (1320)..(1320): n is a, c, g, or t
  misc_feature (1330)..(1330): n is a, c, g, or t
  misc_feature (1337)..(1339): n is a, c, g, or t
  misc_feature (1347)..(1347): n is a, c, g, or t
  misc_feature (1351)..(1351): n is a, c, g, or t
  misc_feature (1356)..(1357): n is a, c, g, or t
  misc_feature (1359)..(1359): n is a, c, g, or t
  misc_feature (1364)..(1366): n is a, c, g, or t
  misc_feature (1369)..(1369): n is a, c, g, or t
  misc_feature (1372)..(1373): n is a, c, g, or t
  misc_feature (1376)..(1376): n is a, c, g, or t
  misc_feature (1379)..(1380): n is a, c, g, or t
  misc_feature (1382)..(1384): n is a, c, g, or t
  misc_feature (1386)..(1386): n is a, c, g, or t
  misc_feature (1388)..(1388): n is a, c, g, or t
  misc_feature (1390)..(1390): n is a, c, g, or t
  misc_feature (1394)..(1397): n is a, c, g, or t
  misc_feature (1401)..(1401): n is a, c, g, or t
  misc_feature (1406)..(1406): n is a, c, g, or t
  misc_feature (1408)..(1408): n is a, c, g, or t
  misc_feature (1410)..(1412): n is a, c, g, or t
  misc_feature (1418)..(1419): n is a, c, g, or t
  misc_feature (1422)..(1423): n is a, c, g, or t
  misc_feature (1425)..(1426): n is a, c, g, or t
  misc_feature (1428)..(1429): n is a, c, g, or t
tagagaaaattactatgagaggatcgcatcaccatcaccatcacggatcctatttaggtgacactatagaatcgtcgacccacgcgtccggctctttcctcagacccccagccttttgtgcgccgcgcggtggggcggtgcccagcttgggggaaggagagcggcgcttatcgaagtgtggtcgacctccatccgcccaccgagcacttgggacccgctgcacatatccagagcagggaaagctgtggctttctcgggggagcgagtgtctaggggaagggtgtggcaggcccacgggatgccatgccctagaacaacggcctgagcgcttgtggaattaaaatgggagatgtggggccgagttctgggaggtgatcagtgatgaacatggcatcgaccccaccggcacctaccacggggacagcgacctgcagctggaccgcatctctgtgtactacaatgaagccacaggtggcaaatatgttcctcgtgccatcctggtggatctagaacctgggaccatggactctgttcgctcaggtccttttggccagatctttagaccagacaactttgtatttggtcagtctggggcaggtaacaactgggccaaaggccactacacagagggcgccgagctggttgattctgtcctggatgtggtacggaaggaggcagagagctgtgactgcctgcagggcttccagctgacccactcactgggcgggggcacaggctctggaatgggcactctccttatcagcaagatccgagaagaataccctgatcgcatcatgaataccttcagtgtggtgccttcacccaaagtgtctgacaccgtggtcgagccctacaatgccacccctctccgtccatcagttggtaaagaatactgatgaaaacctattgcattgacaacgaggccctctatgaaatctgcttccgcactctgaancctgacnacaccaacctacggggatcttaaaccncctngtctcanccnccatgantggngtcnccacctgcctcgtttncctggcaantcaatgctgacctccncaagttggnaatcanatggtcccnttccccgtncccttttttttancctggntttncccctcccccanccnngnaancnacaatnncaantttccangncngaaatccccnaaaggtntnnattccaaaaaaataaggntncttgaaccccccnagnnnaaacccncngggnttttttccgggnnnattcctnaanangcnaaaaaaatttnnantgnaaaaaaannccntntttggaagncccnnaattaaaaaccngtnaccccccggnccaaaannncccttttnaaanacccnnanttttnnnttnaannttnttnncnnnantntntttnnnngggnaaaantncnnnaaaaannccnntnnann

SEQ ID NO: 301 - DNA, 1394 bp, Homo Sapiens
  misc_feature (4)..(4): n is a, c, g, or t
  misc_feature (7)..(9): n is a, c, g, or t
  misc_feature (13)..(15): n is a, c, g, or t
  misc_feature (18)..(19): n is a, c, g, or t
  misc_feature (24)..(28): n is a, c, g, or t
  misc_feature (32)..(35): n is a, c, g, or t
  misc_feature (40)..(40): n is a, c, g, or t
  misc_feature (576)..(576): n is a, c, g, or t
  misc_feature (581)..(581): n is a, c, g, or t
  misc_feature (672)..(672): n is a, c, g, or t
  misc_feature (693)..(693): n is a, c, g, or t
  misc_feature (703)..(703): n is a, c, g, or t
  misc_feature (705)..(705): n is a, c, g, or t
  misc_feature (708)..(708): n is a, c, g, or t
  misc_feature (719)..(719): n is a, c, g, or t
  misc_feature (731)..(731): n is a, c, g, or t
  misc_feature (735)..(735): n is a, c, g, or t
  misc_feature (752)..(752): n is a, c, g, or t
  misc_feature (757)..(757): n is a, c, g, or t
  misc_feature (763)..(763): n is a, c, g, or t
  misc_feature (765)..(765): n is a, c, g, or t
  misc_feature (767)..(767): n is a, c, g, or t
  misc_feature (773)..(773): n is a, c, g, or t
  misc_feature (778)..(778): n is a, c, g, or t
  misc_feature (791)..(791): n is a, c, g, or t
  misc_feature (808)..(809): n is a, c, g, or t
  misc_feature (815)..(815): n is a, c, g, or t
  misc_feature (817)..(817): n is a, c, g, or t
  misc_feature (822)..(823): n is a, c, g, or t
  misc_feature (835)..(835): n is a, c, g, or t
  misc_feature (843)..(843): n is a, c, g, or t
  misc_feature (850)..(851): n is a, c, g, or t
  misc_feature (853)..(853): n is a, c, g, or t
  misc_feature (855)..(856): n is a, c, g, or t
  misc_feature (864)..(864): n is a, c, g, or t
  misc_feature (868)..(868): n is a, c, g, or t
  misc_feature (870)..(870): n is a, c, g, or t
  misc_feature (872)..(872): n is a, c, g, or t
  misc_feature (875)..(875): n is a, c, g, or t
  misc_feature (878)..(880): n is a, c, g, or t
  misc_feature (883)..(884): n is a, c, g, or t
  misc_feature (886)..(889): n is a, c, g, or t
  misc_feature (894)..(894): n is a, c, g, or t
  misc_feature (896)..(896): n is a, c, g, or t
  misc_feature (909)..(909): n is a, c, g, or t
  misc_feature (912)..(913): n is a, c, g, or t
  misc_feature (918)..(918): n is a, c, g, or t
  misc_feature (925)..(925): n is a, c, g, or t
  misc_feature (927)..(927): n is a, c, g, or t
  misc_feature (929)..(929): n is a, c, g, or t
  misc_feature (933)..(934): n is a, c, g, or t
  misc_feature (936)..(937): n is a, c, g, or t
  misc_feature (939)..(939): n is a, c, g, or t
  misc_feature (943)..(943): n is a, c, g, or t
  misc_feature (945)..(945): n is a, c, g, or t
  misc_feature (948)..(948): n is a, c, g, or t
  misc_feature (953)..(955): n is a, c, g, or t
  misc_feature (957)..(957): n is a, c, g, or t
  misc_feature (959)..(959): n is a, c, g, or t
  misc_feature (961)..(963): n is a, c, g, or t
  misc_feature (967)..(970): n is a, c, g, or t
  misc_feature (972)..(973): n is a, c, g, or t
  misc_feature (980)..(980): n is a, c, g, or t
  misc_feature (982)..(982): n is a, c, g, or t
  misc_feature (986)..(987): n is a, c, g, or t
  misc_feature (991)..(994): n is a, c, g, or t
  misc_feature (996)..(999): n is a, c, g, or t
  misc_feature (1001)..(1002): n is a, c, g, or t
  misc_feature (1005)..(1005): n is a, c, g, or t
  misc_feature (1007)..(1007): n is a, c, g, or t
  misc_feature (1010)..(1010): n is a, c, g, or t
  misc_feature (1014)..(1015): n is a, c, g, or t
  misc_feature (1021)..(1022): n is a, c, g, or t
  misc_feature (1027)..(1027): n is a, c, g, or t
  misc_feature (1029)..(1031): n is a, c, g, or t
  misc_feature (1033)..(1034): n is a, c, g, or t
  misc_feature (1040)..(1040): n is a, c, g, or t
  misc_feature (1042)..(1042): n is a, c, g, or t
  misc_feature (1044)..(1045): n is a, c, g, or t
  misc_feature (1047)..(1047): n is a, c, g, or t
  misc_feature (1049)..(1049): n is a, c, g, or t
  misc_feature (1052)..(1052): n is a, c, g, or t
  misc_feature (1055)..(1055): n is a, c, g, or t
  misc_feature (1059)..(1062): n is a, c, g, or t
  misc_feature (1069)..(1069): n is a, c, g, or t
  misc_feature (1073)..(1073): n is a, c, g, or t
  misc_feature (1077)..(1077): n is a, c, g, or t
  misc_feature (1079)..(1079): n is a, c, g, or t
  misc_feature (1086)..(1086): n is a, c, g, or t
  misc_feature (1093)..(1093): n is a, c, g, or t
  misc_feature (1111)..(1113): n is a, c, g, or t
  misc_feature (1116)..(1117): n is a, c, g, or t
  misc_feature (1119)..(1120): n is a, c, g, or t
  misc_feature (1124)..(1125): n is a, c, g, or t
  misc_feature (1128)..(1130): n is a, c, g, or t
  misc_feature (1134)..(1134): n is a, c, g, or t
  misc_feature (1136)..(1138): n is a, c, g, or t
  misc_feature (1141)..(1145): n is a, c, g, or t
  misc_feature (1148)..(1149): n is a, c, g, or t
  misc_feature (1151)..(1151): n is a, c, g, or t
  misc_feature (1154)..(1154): n is a, c, g, or t
  misc_feature (1157)..(1158): n is a, c, g, or t
  misc_feature (1163)..(1163): n is a, c, g, or t
  misc_feature (1169)..(1169): n is a, c, g, or t
  misc_feature (1177)..(1177): n is a, c, g, or t
  misc_feature (1179)..(1182): n is a, c, g, or t
  misc_feature (1186)..(1186): n is a, c, g, or t
  misc_feature (1195)..(1196): n is a, c, g, or t
  misc_feature (1198)..(1198): n is a, c, g, or t
  misc_feature (1203)..(1204): n is a, c, g, or t
  misc_feature (1208)..(1210): n is a, c, g, or t
  misc_feature (1212)..(1212): n is a, c, g, or t
  misc_feature (1214)..(1216): n is a, c, g, or t
  misc_feature (1220)..(1221): n is a, c, g, or t
  misc_feature (1223)..(1223): n is a, c, g, or t
  misc_feature (1225)..(1225): n is a, c, g, or t
  misc_feature (1227)..(1227): n is a, c, g, or t
  misc_feature (1235)..(1236): n is a, c, g, or t
  misc_feature (1239)..(1244): n is a, c, g, or t
  misc_feature (1249)..(1251): n is a, c, g, or t
  misc_feature (1253)..(1253): n is a, c, g, or t
  misc_feature (1255)..(1256): n is a, c, g, or t
  misc_feature (1260)..(1260): n is a, c, g, or t
  misc_feature (1263)..(1263): n is a, c, g, or t
  misc_feature (1268)..(1269): n is a, c, g, or t
  misc_feature (1272)..(1273): n is a, c, g, or t
  misc_feature (1275)..(1276): n is a, c, g, or t
  misc_feature (1278)..(1278): n is a, c, g, or t
  misc_feature (1280)..(1280): n is a, c, g, or t
  misc_feature (1286)..(1286): n is a, c, g, or t
  misc_feature (1289)..(1290): n is a, c, g, or t
  misc_feature (1292)..(1292): n is a, c, g, or t
  misc_feature (1294)..(1294): n is a, c, g, or t
  misc_feature (1299)..(1299): n is a, c, g, or t
  misc_feature (1301)..(1301): n is a, c, g, or t
  misc_feature (1303)..(1303): n is a, c, g, or t
  misc_feature (1305)..(1306): n is a, c, g, or t
  misc_feature (1312)..(1312): n is a, c, g, or t
  misc_feature (1314)..(1315): n is a, c, g, or t
  misc_feature (1317)..(1317): n is a, c, g, or t
  misc_feature (1319)..(1321): n is a, c, g, or t
  misc_feature (1325)..(1325): n is a, c, g, or t
  misc_feature (1327)..(1328): n is a, c, g, or t
  misc_feature (1330)..(1330): n is a, c, g, or t
  misc_feature (1334)..(1334): n is a, c, g, or t
  misc_feature (1337)..(1339): n is a, c, g, or t
  misc_feature (1344)..(1346): n is a, c, g, or t
  misc_feature (1348)..(1350): n is a, c, g, or t
  misc_feature (1353)..(1357): n is a, c, g, or t
  misc_feature (1363)..(1363): n is a, c, g, or t
  misc_feature (1366)..(1367): n is a, c, g, or t
  misc_feature (1369)..(1369): n is a, c, g, or t
  misc_feature (1373)..(1373): n is a, c, g, or t
  misc_feature (1375)..(1375): n is a, c, g, or t
  misc_feature (1377)..(1378): n is a, c, g, or t
  misc_feature (1382)..(1384): n is a, c, g, or t
  misc_feature (1388)..(1388): n is a, c, g, or t
  misc_feature (1393)..(1393): n is a, c, g, or t
tttnttnnnattnnnttnnatttnnnnntaannnnccgcntcaccatcaccatcacggatcctatttaggtgacactatagaatcgtcgacccacgcgttccgaggagaacgcggtctccctggagcccctggaaaggcaggaccagtggggcccaaaggagaccgaggagagaaggggatgcgtggagagaaaggagacgctgggcagtctcagtcgtgtgcgacaggcccacgcaactgcaaggacctgctagaccgggggtatttcctgagcggctggcacaccatctacctgcccgactgccggcccctgactgtgctctgtgacatggacacggacggagggggctggaccgttttccagcggaggatggatggctctgtggacttctatcgggactgggccgcatacaagcagggcttcggcagtcagctgggggagttctggctggggaacgacaacatccacgccctgactgcccagggaagcagcgagctccgtgtagacctggtggactttgagggcaaccaccagtttgctaagtacaaatcattcaaggtggctgacgaggcanagaantacaagctggtactgggagcctttgtcgggggcagtgcgggtaattctctaacgggccacaacaacaacttcttctccaccaaagaccaanacaatgatgttgagttcttcnaattgtgctnanaanttccagggaancctggtggtacncctnactgtcatgcttcaaanctcantggtcntntnccttcntgggnaccccatgaaatntatgccaattggttatnnacctgnantgcgnncaaaaggttacnaatttatntttcaanntntnntaaaattnaatntntntanccnnnctnnannnnttcantnaaccccttcttanttnntcctntttattngngnaagnncnntncccncnatnctttnnntncnannnattnnnncnnctttttncnctanntaannnntnnnncnntanantcnattnntttccnnttttncnnncnntctttntnanntntnccntanttcnnnnttttttncttnaatnanaattttnttttccnaaattatttttaattttnnnctnnannatannttnnntaantnnntannnnntannanttnaannctttnctcctnctttttantnnnnttanatatttatnntnattanntttnnntntnnnttcnntntntnaaatatanntannnnnnttaannntntnntttnttntttanntanncnnantntcttcnttnntnanatttntntntnntaactntnntntnnntttntnntntttnatnnnatttnnncnnnatnnnnnattaantanntnttantntnnatannntatnttctna

SEQ ID NO: 302 - DNA, 1393 bp, Homo Sapiens
  misc_feature (611)..(611): n is a, c, g, or t
  misc_feature (736)..(736): n is a, c, g, or t
  misc_feature (740)..(740): n is a, c, g, or t
  misc_feature (749)..(749): n is a, c, g, or t
  misc_feature (754)..(754): n is a, c, g, or t
  misc_feature (759)..(759): n is a, c, g, or t
  misc_feature (761)..(761): n is a, c, g, or t
  misc_feature (768)..(768): n is a, c, g, or t
  misc_feature (774)..(774): n is a, c, g, or t
  misc_feature (778)..(778): n is a, c, g, or t
  misc_feature (805)..(806): n is a, c, g, or t
  misc_feature (810)..(810): n is a, c, g, or t
  misc_feature (813)..(813): n is a, c, g, or t
  misc_feature (815)..(815): n is a, c, g, or t
  misc_feature (818)..(819): n is a, c, g, or t
  misc_feature (821)..(822): n is a, c, g, or t
  misc_feature (831)..(831): n is a, c, g, or t
  misc_feature (833)..(833): n is a, c, g, or t
  misc_feature (835)..(837): n is a, c, g, or t
  misc_feature (840)..(840): n is a, c, g, or t
  misc_feature (846)..(846): n is a, c, g, or t
  misc_feature (849)..(849): n is a, c, g, or t
  misc_feature (852)..(852): n is a, c, g, or t
  misc_feature (856)..(856): n is a, c, g, or t
  misc_feature (869)..(869): n is a, c, g, or t
  misc_feature (872)..(872): n is a, c, g, or t
  misc_feature (882)..(882): n is a, c, g, or t
  misc_feature (886)..(886): n is a, c, g, or t
  misc_feature (891)..(891): n is a, c, g, or t
  misc_feature (894)..(894): n is a, c, g, or t
  misc_feature (896)..(896): n is a, c, g, or t
  misc_feature (899)..(899): n is a, c, g, or t
  misc_feature (904)..(904): n is a, c, g, or t
  misc_feature (907)..(907): n is a, c, g, or t
  misc_feature (913)..(914): n is a, c, g, or t
  misc_feature (918)..(919): n is a, c, g, or t
  misc_feature (924)..(924): n is a, c, g, or t
  misc_feature (926)..(926): n is a, c, g, or t
  misc_feature (929)..(930): n is a, c, g, or t
  misc_feature (932)..(932): n is a, c, g, or t
  misc_feature (937)..(937): n is a, c, g, or t
  misc_feature (942)..(942): n is a, c, g, or t
  misc_feature (944)..(944): n is a, c, g, or t
  misc_feature (953)..(953): n is a, c, g, or t
  misc_feature (955)..(955): n is a, c, g, or t
  misc_feature (958)..(958): n is a, c, g, or t
  misc_feature (960)..(960): n is a, c, g, or t
  misc_feature (962)..(963): n is a, c, g, or t
  misc_feature (966)..(969): n is a, c, g, or t
  misc_feature (976)..(980): n is a, c, g, or t
  misc_feature (982)..(984): n is a, c, g, or t
  misc_feature (990)..(990): n is a, c, g, or t
  misc_feature (992)..(992): n is a, c, g, or t
  misc_feature (995)..(996): n is a, c, g, or t
  misc_feature (998)..(999): n is a, c, g, or t
  misc_feature (1002)..(1004): n is a, c, g, or t
  misc_feature (1008)..(1014): n is a, c, g, or t
  misc_feature (1016)..(1016): n is a, c, g, or t
  misc_feature (1019)..(1022): n is a, c, g, or t
  misc_feature (1025)..(1025): n is a, c, g, or t
  misc_feature (1027)..(1029): n is a, c, g, or t
  misc_feature (1032)..(1033): n is a, c, g, or t
  misc_feature (1036)..(1038): n is a, c, g, or t
  misc_feature (1041)..(1041): n is a, c, g, or t
  misc_feature (1044)..(1044): n is a, c, g, or t
  misc_feature (1047)..(1052): n is a, c, g, or t
  misc_feature (1054)..(1055): n is a, c, g, or t
  misc_feature (1058)..(1058): n is a, c, g, or t
  misc_feature (1061)..(1062): n is a, c, g, or t
  misc_feature (1064)..(1065): n is a, c, g, or t
  misc_feature (1069)..(1071): n is a, c, g, or t
  misc_feature (1074)..(1079): n is a, c, g, or t
  misc_feature (1082)..(1085): n is a, c, g, or t
  misc_feature (1088)..(1091): n is a, c, g, or t
  misc_feature (1093)..(1093): n is a, c, g, or t
  misc_feature (1096)..(1107): n is a, c, g, or t
  misc_feature (1112)..(1116): n is a, c, g, or t
  misc_feature (1118)..(1119): n is a, c, g, or t
  misc_feature (1121)..(1122): n is a, c, g, or t
  misc_feature (1124)..(1139): n is a, c, g, or t
  misc_feature (1141)..(1142): n is a, c, g, or t
  misc_feature (1144)..(1160): n is a, c, g, or t
  misc_feature (1162)..(1164): n is a, c, g, or t
  misc_feature (1166)..(1174): n is a, c, g, or t
  misc_feature (1176)..(1181): n is a, c, g, or t
  misc_feature (1183)..(1184): n is a, c, g, or t
  misc_feature (1187)..(1197): n is a, c, g, or t
  misc_feature (1199)..(1206): n is a, c, g, or t
  misc_feature (1209)..(1236): n is a, c, g, or t
  misc_feature (1238)..(1242): n is a, c, g, or t
  misc_feature (1244)..(1251): n is a, c, g, or t
  misc_feature (1253)..(1255): n is a, c, g, or t
  misc_feature (1257)..(1262): n is a, c, g, or t
  misc_feature (1264)..(1265): n is a, c, g, or t
  misc_feature (1268)..(1268): n is a, c, g, or t
  misc_feature (1271)..(1275): n is a, c, g, or t
  misc_feature (1278)..(1279): n is a, c, g, or t
  misc_feature (1281)..(1283): n is a, c, g, or t
  misc_feature (1285)..(1289): n is a, c, g, or t
  misc_feature (1291)..(1299): n is a, c, g, or t
  misc_feature (1301)..(1305): n is a, c, g, or t
  misc_feature (1307)..(1307): n is a, c, g, or t
  misc_feature (1309)..(1309): n is a, c, g, or t
  misc_feature (1311)..(1315): n is a, c, g, or t
  misc_feature (1317)..(1323): n is a, c, g, or t
  misc_feature (1325)..(1329): n is a, c, g, or t
  misc_feature (1331)..(1331): n is a, c, g, or t
  misc_feature (1333)..(1333): n is a, c, g, or t
  misc_feature (1335)..(1336): n is a, c, g, or t
  misc_feature (1338)..(1350): n is a, c, g, or t
  misc_feature (1352)..(1353): n is a, c, g, or t
  misc_feature (1355)..(1379): n is a, c, g, or t
  misc_feature (1381)..(1381): n is a, c, g, or t
  misc_feature (1383)..(1385): n is a, c, g, or t
  misc_feature (1387)..(1391): n is a, c, g, or t
attagagaaattactatgagaggatcgcatcaccatcaccatcacggatcctatttaggtgacactatagaatcgtcgacccacgcgtccgaggtatcggaagcaggagagaaccccctggagttcctgcgggaccagccccagttccagaacatgcggcaggtgattcagcagaaccctgcgctgctgcccgccctgctccagcagctgggccaggagaaccctcagcttttacagcaaatcagccggcaccaggagcagttcatccagatgctgaacgagccccctggggagctggcggacatctcagatgtggagggggaggtgggcgccataggagaggaggccccgcagatgaactacatccaggtgacgccgcaggagaaagaagctatagagaggttgaaggccctgggcttcccagagagcctggtcatccaggcctatttcgcgtgtgaaaaaaatgagaacttggctgccaacttcctcctgagtcagaactttgatgacgagtgatgccaggaagccaggccaccgaagcccccaccctacccttattccatgaaagttttataaaagaaaaaatatatatatattcatgtttatttaanaaatggaaaaaaaaaatcaaaaatcttaaaaaaacaagcaaacagtccagcttcctgtcctcctaaagtggcccctgttcccatctcccgggccagacagctgtccccccgtcctcctccccagnccancctgttcanaaaanctggnangactggnaaggcnacanatgggcccctcttggcctctgtcccanntctntgnanccnnanngaaaaggcngntnnnttncctctnccntcntccnaaaaacccctgangancccccccccnttcntcttntangnttnagggnaanctgganncccnnttttnantcnncntttgnatggncncaatttttncnttnangnnaannnnttaaagnnnnnannncccctncnctnntnntgnnnttgnnnnnnncnttnnnnaangnnntannttnnnttnttnttnnnnnntnnccnccnncnnaaannnaannnnnnttnnnnatnnnntnttnnnnnnnnnnnnttttnnnnntnntnntnnnnnnnnnnnnnnnntnntnnnnnnnnnnnnnnnnntnnntnnnnnnnnnannnnnnannttnnnnnnnnnnntnnnnnnnnttnnnnnnnnnnnnnnnnnnnnnnnnnnnntnnnnntnnnnnnnntnnntnnnnnntnnttnttnnnnntanntnnntnnnnntnnnnnnnnntnnnnntntntnnnnnannnnnnntnnnnntntntnntnnnnnnnnnnnnntnntnnnnnnnnnnnnnnnnnnnnnnnnntntnnntnnnnntt

SEQ ID NO: 303 - DNA, 1466 bp, Homo Sapiens
  misc_feature (2)..(6): n is a, c, g, or t
  misc_feature (8)..(9): n is a, c, g, or t
  misc_feature (20)..(21): n is a, c, g, or t
  misc_feature (26)..(27): n is a, c, g, or t
  misc_feature (29)..(29): n is a, c, g, or t
  misc_feature (34)..(34): n is a, c, g, or t
  misc_feature (705)..(705): n is a, c, g, or t
  misc_feature (751)..(751): n is a, c, g, or t
  misc_feature (764)..(764): n is a, c, g, or t
  misc_feature (787)..(787): n is a, c, g, or t
  misc_feature (811)..(812): n is a, c, g, or t
  misc_feature (817)..(817): n is a, c, g, or t
  misc_feature (819)..(819): n is a, c, g, or t
  misc_feature (827)..(827): n is a, c, g, or t
  misc_feature (861)..(861): n is a, c, g, or t
  misc_feature (872)..(872): n is a, c, g, or t
  misc_feature (874)..(874): n is a, c, g, or t
  misc_feature (880)..(880): n is a, c, g, or t
  misc_feature (884)..(884): n is a, c, g, or t
  misc_feature (894)..(894): n is a, c, g, or t
  misc_feature (897)..(897): n is a, c, g, or t
  misc_feature (903)..(904): n is a, c, g, or t
  misc_feature (933)..(933): n is a, c, g, or t
  misc_feature (941)..(941): n is a, c, g, or t
  misc_feature (944)..(944): n is a, c, g, or t
  misc_feature (951)..(951): n is a, c, g, or t
  misc_feature (953)..(953): n is a, c, g, or t
  misc_feature (956)..(957): n is a, c, g, or t
  misc_feature (959)..(959): n is a, c, g, or t
  misc_feature (962)..(963): n is a, c, g, or t
  misc_feature (965)..(965): n is a, c, g, or t
  misc_feature (973)..(973): n is a, c, g, or t
  misc_feature (975)..(975): n is a, c, g, or t
  misc_feature (979)..(979): n is a, c, g, or t
  misc_feature (981)..(981): n is a, c, g, or t
  misc_feature (984)..(985): n is a, c, g, or t
  misc_feature (1002)..(1002): n is a, c, g, or t
  misc_feature (1009)..(1009): n is a, c, g, or t
  misc_feature (1011)..(1011): n is a, c, g, or t
  misc_feature (1015)..(1017): n is a, c, g, or t
  misc_feature (1021)..(1021): n is a, c, g, or t
  misc_feature (1027)..(1027): n is a, c, g, or t
  misc_feature (1030)..(1030): n is a, c, g, or t
  misc_feature (1032)..(1033): n is a, c, g, or t
  misc_feature (1036)..(1036): n is a, c, g, or t
  misc_feature (1038)..(1039): n is a, c, g, or t
  misc_feature (1043)..(1043): n is a, c, g, or t
  misc_feature (1051)..(1051): n is a, c, g, or t
  misc_feature (1058)..(1058): n is a, c, g, or t
  misc_feature (1071)..(1071): n is a, c, g, or t
  misc_feature (1083)..(1083): n is a, c, g, or t
  misc_feature (1092)..(1094): n is a, c, g, or t
  misc_feature (1107)..(1107): n is a, c, g, or t
  misc_feature (1116)..(1117): n is a, c, g, or t
  misc_feature (1124)..(1124): n is a, c, g, or t
  misc_feature (1129)..(1130): n is a, c, g, or t
  misc_feature (1141)..(1143): n is a, c, g, or t
  misc_feature (1154)..(1154): n is a, c, g, or t
  misc_feature (1157)..(1158): n is a, c, g, or t
  misc_feature (1162)..(1162): n is a, c, g, or t
  misc_feature (1166)..(1166): n is a, c, g, or t
  misc_feature (1175)..(1177): n is a, c, g, or t
  misc_feature (1179)..(1180): n is a, c, g, or t
  misc_feature (1189)..(1189): n is a, c, g, or t
  misc_feature (1197)..(1200): n is a, c, g, or t
  misc_feature (1203)..(1204): n is a, c, g, or t
  misc_feature (1223)..(1223): n is a, c, g, or t
  misc_feature (1225)..(1225): n is a, c, g, or t
  misc_feature (1229)..(1231): n is a, c, g, or t
  misc_feature (1234)..(1234): n is a, c, g, or t
  misc_feature (1236)..(1237): n is a, c, g, or t
  misc_feature (1239)..(1239): n is a, c, g, or t
  misc_feature (1247)..(1247): n is a, c, g, or t
  misc_feature (1249)..(1249): n is a, c, g, or t
  misc_feature (1254)..(1256): n is a, c, g, or t
  misc_feature (1269)..(1270): n is a, c, g, or t
  misc_feature (1272)..(1272): n is a, c, g, or t
  misc_feature (1277)..(1277): n is a, c, g, or t
  misc_feature (1280)..(1281): n is a, c, g, or t
  misc_feature (1288)..(1288): n is a, c, g, or t
  misc_feature (1291)..(1291): n is a, c, g, or t
  misc_feature (1296)..(1296): n is a, c, g, or t
  misc_feature (1305)..(1306): n is a, c, g, or t
  misc_feature (1308)..(1310): n is a, c, g, or t
  misc_feature (1316)..(1317): n is a, c, g, or t
  misc_feature (1319)..(1320): n is a, c, g, or t
  misc_feature (1322)..(1323): n is a, c, g, or t
  misc_feature (1329)..(1329): n is a, c, g, or t
  misc_feature (1335)..(1335): n is a, c, g, or t
  misc_feature (1340)..(1340): n is a, c, g, or t
  misc_feature (1342)..(1342): n is a, c, g, or t
  misc_feature (1345)..(1345): n is a, c, g, or t
  misc_feature (1353)..(1353): n is a, c, g, or t
  misc_feature (1358)..(1358): n is a, c, g, or t
  misc_feature (1364)..(1365): n is a, c, g, or t
  misc_feature (1367)..(1368): n is a, c, g, or t
  misc_feature (1375)..(1377): n is a, c, g, or t
  misc_feature (1380)..(1380): n is a, c, g, or t
  misc_feature (1385)..(1385): n is a, c, g, or t
  misc_feature (1388)..(1393): n is a, c, g, or t
  misc_feature (1399)..(1400): n is a, c, g, or t
  misc_feature (1405)..(1406): n is a, c, g, or t
  misc_feature (1408)..(1409): n is a, c, g, or t
  misc_feature (1412)..(1412): n is a, c, g, or t
  misc_feature (1414)..(1415): n is a, c, g, or t
  misc_feature (1419)..(1420): n is a, c, g, or t
  misc_feature (1425)..(1425): n is a, c, g, or t
  misc_feature (1429)..(1429): n is a, c, g, or t
  misc_feature (1431)..(1431): n is a, c, g, or t
  misc_feature (1439)..(1440): n is a, c, g, or t
  misc_feature (1446)..(1446): n is a, c, g, or t
  misc_feature (1448)..(1450): n is a, c, g, or t
  misc_feature (1456)..(1456): n is a, c, g, or t
  misc_feature (1465)..(1466): n is a, c, g, or t
cnnnnntnnaataactatgnnagganngntcccntcaccatcacggatcctatttaggtgacactatagaatcgtcgacccacgcgtccgcccacgcgtccgcaactcttttgaatggaatcgggctgattcatcgccggtttgcagacagagccgcgtcgggtgtgcgccgctgctgctgttgcctctgtcttcgcgtcaccacagaggcaagacaagggtccatatcgcggcatccggctcccgcccgtcttcaggagagaaagaaaaaataaaatatacttggggaagttgtacctgccagaattagcaagagctttctttaagaagacatttgtcaaactcaacaaattgaaggttaacaccttaagagttgtagttactgaccagaaatatggacagacttcttagacttggaggaggtatgcctggactgggccaggggccacctacagatgctcctgcagtggacacagcagaacaagtctatatctcttccctggcactgttaaaaatgttaaaacatggccgtgctggagttccaatggaagttatgggtttgatgcttggagaatttgttgatgattataccgtcagagtgattgatgtgtttgctatgccacagtcaggaacaggtgtcagtgtggaggcagttgatccagtgttccaagctaaaatgttggatatgttgaagcagacaggaangccggagatggttgtttggttggtatcacagtcaccctggctttgnttgttggctttcntggtgtggaaatcaacacctcancaaaagcttttgaaagccttgtcnnaaaananctgtggcngtggtttgtggatccccattccagagtgtaaaangaaaaggttgntnattgangccnttccgaattnatnaatgcnnattatgaatggtcctttaagaaactgganccaagaanaanaaatttncnaanntnggnncntttaaacnanggcntnctnntccagggattttaattncttggancnaaannnaacntttttnccncnnttncnnttanaccaaccnaaaaaantgaaatggaaatnaaaaaaagtttncaaattttnnnaaaaaaaaaattngaatgaaanntttaaanctttnnggaactccatnnnaattttttaancannaaanctgngacaaaaannntnnaattacccnaaaattannnnttnngttaaaaaaaaaaaaaaancncccnnntangnnanaaaaattntnaacannncccaaaatatttnnanacagnggnngtcatanaancctanatatccccnntnnntccctnnanncnntctttnttcacnttccntnttntaaaacanaaaanatcatnntnnaatatannntanaaaanatnnnnnnttcatnnctttnncnnctncnncctnnaatcnaatntncttctatnnacattnannntattantattctgtnn

SEQ ID NO: 304 - DNA, 1564 bp, Homo Sapiens
  misc_feature (3)..(4): n is a, c, g, or t
  misc_feature (7)..(8): n is a, c, g, or t
  misc_feature (10)..(10): n is a, c, g, or t
  misc_feature (12)..(12): n is a, c, g, or t
  misc_feature (15)..(15): n is a, c, g, or t
  misc_feature (24)..(24): n is a, c, g, or t
  misc_feature (30)..(30): n is a, c, g, or t
  misc_feature (64)..(64): n is a, c, g, or t
  misc_feature (112)..(112): n is a, c, g, or t
  misc_feature (203)..(203): n is a, c, g, or t
  misc_feature (206)..(206): n is a, c, g, or t
  misc_feature (244)..(244): n is a, c, g, or t
  misc_feature (275)..(275): n is a, c, g, or t
  misc_feature (303)..(303): n is a, c, g, or t
  misc_feature (314)..(314): n is a, c, g, or t
  misc_feature (336)..(336): n is a, c, g, or t
  misc_feature (350)..(350): n is a, c, g, or t
  misc_feature (354)..(354): n is a, c, g, or t
  misc_feature (360)..(360): n is a, c, g, or t
  misc_feature (364)..(364): n is a, c, g, or t
  misc_feature (372)..(372): n is a, c, g, or t
  misc_feature (378)..(378): n is a, c, g, or t
  misc_feature (443)..(444): n is a, c, g, or t
  misc_feature (471)..(472): n is a, c, g, or t
  misc_feature (477)..(477): n is a, c, g, or t
  misc_feature (480)..(480): n is a, c, g, or t
  misc_feature (482)..(482): n is a, c, g, or t
  misc_feature (499)..(499): n is a, c, g, or t
  misc_feature (501)..(501): n is a, c, g, or t
  misc_feature (504)..(504): n is a, c, g, or t
  misc_feature (520)..(520): n is a, c, g, or t
  misc_feature (523)..(523): n is a, c, g, or t
  misc_feature (527)..(527): n is a, c, g, or t
  misc_feature (534)..(535): n is a, c, g, or t
  misc_feature (537)..(537): n is a, c, g, or t
  misc_feature (544)..(544): n is a, c, g, or t
  misc_feature (546)..(546): n is a, c, g, or t
  misc_feature (549)..(549): n is a, c, g, or t
  misc_feature (557)..(557): n is a, c, g, or t
  misc_feature (567)..(568): n is a, c, g, or t
  misc_feature (573)..(575): n is a, c, g, or t
  misc_feature (580)..(580): n is a, c, g, or t
  misc_feature (589)..(589): n is a, c, g, or t
  misc_feature (592)..(592): n is a, c, g, or t
  misc_feature (597)..(597): n is a, c, g, or t
  misc_feature (606)..(606): n is a, c, g, or t
  misc_feature (616)..(616): n is a, c, g, or t
  misc_feature (619)..(620): n is a, c, g, or t
  misc_feature (636)..(636): n is a, c, g, or t
  misc_feature (641)..(641): n is a, c, g, or t
  misc_feature (649)..(649): n is a, c, g, or t
  misc_feature (656)..(656): n is a, c, g, or t
  misc_feature (660)..(660): n is a, c, g, or t
  misc_feature (665)..(665): n is a, c, g, or t
  misc_feature (668)..(668): n is a, c, g, or t
  misc_feature (674)..(676): n is a, c, g, or t
  misc_feature (678)..(678): n is a, c, g, or t
  misc_feature (681)..(681): n is a, c, g, or t
  misc_feature (684)..(684): n is a, c, g, or t
  misc_feature (689)..(689): n is a, c, g, or t
  misc_feature (691)..(692): n is a, c, g, or t
  misc_feature (694)..(694): n is a, c, g, or t
  misc_feature (699)..(699): n is a, c, g, or t
  misc_feature (701)..(702): n is a, c, g, or t
  misc_feature (704)..(705): n is a, c, g, or t
  misc_feature (708)..(708): n is a, c, g, or t
  misc_feature (712)..(713): n is a, c, g, or t
  misc_feature (718)..(718): n is a, c, g, or t
  misc_feature (721)..(721): n is a, c, g, or t
  misc_feature (729)..(730): n is a, c, g, or t
  misc_feature (733)..(733): n is a, c, g, or t
  misc_feature (735)..(736): n is a, c, g, or t
  misc_feature (741)..(741): n is a, c, g, or t
  misc_feature (744)..(744): n is a, c, g, or t
  misc_feature (748)..(748): n is a, c, g, or t
  misc_feature (750)..(752): n is a, c, g, or t
  misc_feature (758)..(758): n is a, c, g, or t
  misc_feature (760)..(760): n is a, c, g, or t
  misc_feature (766)..(767): n is a, c, g, or t
  misc_feature (771)..(771): n is a, c, g, or t
  misc_feature (773)..(773): n is a, c, g, or t
  misc_feature (776)..(776): n is a, c, g, or t
  misc_feature (782)..(783): n is a, c, g, or t
  misc_feature (790)..(790): n is a, c, g, or t
  misc_feature (795)..(795): n is a, c, g, or t
  misc_feature (810)..(810): n is a, c, g, or t
  misc_feature (812)..(812): n is a, c, g, or t
  misc_feature (816)..(816): n is a, c, g, or t
  misc_feature (819)..(819): n is a, c, g, or t
  misc_feature (821)..(821): n is a, c, g, or t
  misc_feature (827)..(827): n is a, c, g, or t
  misc_feature (829)..(829): n is a, c, g, or t
  misc_feature (832)..(832): n is a, c, g, or t
  misc_feature (835)..(835): n is a, c, g, or t
  misc_feature (840)..(840): n is a, c, g, or t
  misc_feature (842)..(843): n is a, c, g, or t
  misc_feature (849)..(849): n is a, c, g, or t
  misc_feature (851)..(851): n is a, c, g, or t
  misc_feature (853)..(853): n is a, c, g, or t
  misc_feature (856)..(856): n is a, c, g, or t
  misc_feature (858)..(859): n is a, c, g, or t
  misc_feature (862)..(862): n is a, c, g, or t
  misc_feature (871)..(872): n is a, c, g, or t
  misc_feature (879)..(879): n is a, c, g, or t
  misc_feature (881)..(882): n is a, c, g, or t
  misc_feature (888)..(888): n is a, c, g, or t
  misc_feature (892)..(892): n is a, c, g, or t
  misc_feature (896)..(896): n is a, c, g, or t
  misc_feature (898)..(898): n is a, c, g, or t
  misc_feature (907)..(908): n is a, c, g, or t
  misc_feature (911)..(911): n is a, c, g, or t
  misc_feature (916)..(917): n is a, c, g, or t
  misc_feature (925)..(926): n is a, c, g, or t
  misc_feature (930)..(930): n is a, c, g, or t
  misc_feature (934)..(936): n is a, c, g, or t
  misc_feature (940)..(940): n is a, c, g, or t
  misc_feature (942)..(944): n is a, c, g, or t
  misc_feature (946)..(946): n is a, c, g, or t
  misc_feature (948)..(948): n is a, c, g, or t
  misc_feature (951)..(951): n is a, c, g, or t
  misc_feature (957)..(957): n is a, c, g, or t
  misc_feature (964)..(964): n is a, c, g, or t
  misc_feature (973)..(973): n is a, c, g, or t
  misc_feature (976)..(977): n is a, c, g, or t
  misc_feature (980)..(980): n is a, c, g, or t
  misc_feature (982)..(983): n is a, c, g, or t
  misc_feature (989)..(989): n is a, c, g, or t
  misc_feature (992)..(992): n is a, c, g, or t
  misc_feature (994)..(995): n is a, c, g, or t
  misc_feature (997)..(998): n is a, c, g, or t
  misc_feature (1002)..(1002): n is a, c, g, or t
  misc_feature (1004)..(1004): n is a, c, g, or t
  misc_feature (1011)..(1012): n is a, c, g, or t
  misc_feature (1016)..(1018): n is a, c, g, or t
  misc_feature (1022)..(1025): n is a, c, g, or t
  misc_feature (1030)..(1030): n is a, c, g, or t
  misc_feature (1033)..(1033): n is a, c, g, or t
  misc_feature (1036)..(1036): n is a, c, g, or t
  misc_feature (1039)..(1040): n is a, c, g, or t
  misc_feature (1046)..(1047): n is a, c, g, or t
  misc_feature (1055)..(1057): n is a, c, g, or t
  misc_feature (1059)..(1060): n is a, c, g, or t
  misc_feature (1064)..(1064): n is a, c, g, or t
  misc_feature (1068)..(1070): n is a, c, g, or t
  misc_feature (1072)..(1073): n is a, c, g, or t
  misc_feature (1076)..(1078): n is a, c, g, or t
  misc_feature (1083)..(1084): n is a, c, g, or t
  misc_feature (1093)..(1093): n is a, c, g, or t
  misc_feature (1102)..(1104): n is a, c, g, or t
  misc_feature (1109)..(1111): n is a, c, g, or t
  misc_feature (1119)..(1119): n is a, c, g, or t
  misc_feature (1121)..(1121): n is a, c, g, or t
  misc_feature (1126)..(1128): n is a, c, g, or t
  misc_feature (1130)..(1131): n is a, c, g, or t
  misc_feature (1135)..(1136): n is a, c, g, or t
  misc_feature (1139)..(1139): n is a, c, g, or t
  misc_feature (1142)..(1144): n is a, c, g, or t
  misc_feature (1148)..(1148): n is a, c, g, or t
  misc_feature (1152)..(1152): n is a, c, g, or t
  misc_feature (1154)..(1155): n is a, c, g, or t
  misc_feature (1157)..(1157): n is a, c, g, or t
  misc_feature (1159)..(1160): n is a, c, g, or t
  misc_feature (1163)..(1163): n is a, c, g, or t
  misc_feature (1165)..(1168): n is a, c, g, or t
  misc_feature (1172)..(1172): n is a, c, g, or t
  misc_feature (1174)..(1174): n is a, c, g, or t
  misc_feature (1177)..(1178): n is a, c, g, or t
  misc_feature (1181)..(1181): n is a, c, g, or t
  misc_feature (1189)..(1189): n is a, c, g, or t
  misc_feature (1194)..(1194): n is a, c, g, or t
  misc_feature (1197)..(1197): n is a, c, g, or t
  misc_feature (1203)..(1203): n is a, c, g, or t
  misc_feature (1206)..(1206): n is a, c, g, or t
  misc_feature (1210)..(1212): n is a, c, g, or t
  misc_feature (1215)..(1216): n is a, c, g, or t
  misc_feature (1219)..(1219): n is a, c, g, or t
  misc_feature (1225)..(1225): n is a, c, g, or t
  misc_feature (1230)..(1230): n is a, c, g, or t
  misc_feature (1232)..(1232): n is a, c, g, or t
  misc_feature (1236)..(1236): n is a, c, g, or t
  misc_feature (1240)..(1240): n is a, c, g, or t
  misc_feature (1248)..(1251): n is a, c, g, or t
  misc_feature (1259)..(1260): n is a, c, g, or t
  misc_feature (1265)..(1266): n is a, c, g, or t
  misc_feature (1268)..(1268): n is a, c, g, or t
  misc_feature (1270)..(1270): n is a, c, g, or t
  misc_feature (1272)..(1274): n is a, c, g, or t
  misc_feature (1280)..(1280): n is a, c, g, or t
  misc_feature (1282)..(1283): n is a, c, g, or t
  misc_feature (1290)..(1292): n is a, c, g, or t
  misc_feature (1296)..(1297): n is a, c, g, or t
  misc_feature (1308)..(1308): n is a, c, g, or t
  misc_feature (1310)..(1310): n is a, c, g, or t
  misc_feature (1317)..(1317): n is a, c, g, or t
  misc_feature (1320)..(1320): n is a, c, g, or t
  misc_feature (1324)..(1325): n is a, c, g, or t
  misc_feature (1328)..(1328): n is a, c, g, or t
  misc_feature (1331)..(1331): n is a, c, g, or t
  misc_feature (1334)..(1334): n is a, c, g, or t
  misc_feature (1337)..(1337): n is a, c, g, or t
  misc_feature (1341)..(1341): n is a, c, g, or t
  misc_feature (1346)..(1346): n is a, c, g, or t
  misc_feature (1349)..(1350): n is a, c, g, or t
  misc_feature (1354)..(1354): n is a, c, g, or t
  misc_feature (1361)..(1362): n is a, c, g, or t
  misc_feature (1370)..(1370): n is a, c, g, or t
  misc_feature (1372)..(1373): n is a, c, g, or t
  misc_feature (1381)..(1381): n is a, c, g, or t
  misc_feature (1383)..(1384): n is a, c, g, or t
  misc_feature (1388)..(1389): n is a, c, g, or t
  misc_feature (1392)..(1392): n is a, c, g, or t
  misc_feature (1395)..(1395): n is a, c, g, or t
  misc_feature (1403)..(1404): n is a, c, g, or t
  misc_feature (1410)..(1411): n is a, c, g, or t
  misc_feature (1422)..(1422): n is a, c, g, or t
  misc_feature (1430)..(1430): n is a, c, g, or t
  misc_feature (1433)..(1433): n is a, c, g, or t
  misc_feature (1436)..(1436): n is a, c, g, or t
  misc_feature (1439)..(1439): n is a, c, g, or t
  misc_feature (1441)..(1441): n is a, c, g, or t
  misc_feature (1445)..(1446): n is a, c, g, or t
  misc_feature (1455)..(1456): n is a, c, g, or t
  misc_feature (1460)..(1460): n is a, c, g, or t
  misc_feature (1466)..(1466): n is a, c, g, or t
  misc_feature (1469)..(1469): n is a, c, g, or t
  misc_feature (1474)..(1474): n is a, c, g, or t
  misc_feature (1484)..(1485): n is a, c, g, or t
  misc_feature (1489)..(1489): n is a, c, g, or t
  misc_feature (1492)..(1492): n is a, c, g, or t
  misc_feature (1496)..(1496): n is a, c, g, or t
  misc_feature (1506)..(1506): n is a, c, g, or t
  misc_feature (1509)..(1509): n is a, c, g, or t
  misc_feature (1512)..(1512): n is a, c, g, or t
  misc_feature (1518)..(1518): n is a, c, g, or t
  misc_feature (1526)..(1526): n is a, c, g, or t
  misc_feature (1532)..(1532): n is a, c, g, or t
  misc_feature (1539)..(1539): n is a, c, g, or t
  misc_feature (1542)..(1542): n is a, c, g, or t
  misc_feature (1544)..(1544): n is a, c, g, or t
  misc_feature (1555)..(1555): n is a, c, g, or t
  misc_feature (1562)..(1562): n is a, c, g, or t
ccnnctnnangnaantactatganaggatngcatcaccatcaccatcacggatcctatttaggngacactatagaatcgtcgacccacgcgttccggcccgccgccctctgncgccgcaccctgcacacccgcccctctcctgtgccaggaacttgctactaccagcaccatgccctaccaatatccagcactgaccccggancanaagaaggagctgtctgacatcgctcaccgcatcgtggnacctggcaagggcatcctggctgcagatgantccactgggagcattgccaagcggctgnagtccattggnaccgagaacaccgaggagaacnggcgcttctaccgncagntgctgntganagctgacnaccgcntgaacccctgcattgggggtgtcatcctcttccatgatacactctaccagaaggcggatgatggnngtcccttcccccaagttattcaaatcnnagggnggngntgtgggcatcaaggtananaanggcgtggtccccctgncangganaaatggnnanactaatncnccnagggttgnatggtctgtnntgacnnnttgtncccaagtanaanaaggnacgggaagntgacttcgcnaanntggcgttgttgttgantgaanattggagnaaacacnatcnccctncancctctnnncnatntanggaananngncaatngnntnnggncccnntaatnccnagatatcnngcncnntcaanaangtcntnnntggccnantcgtannatcncnganatcctnnccctgantaggnttaccaatgaattgnangctnttnanagtatnanaancgnaaaananntcttgncntnctntnnttnaattattcnntaaaacnanntatcanatantaancncgggtaagnnacnattgnntttaaacnnatanaatnnnatancnnnancnctncttttntctatanccaaaaatntcnnacnanntattanatntnncnngtcntnatatttnncaannngttnnnntcatnaanttnctnncctctnnttcataannnannaacntttnnngnntannnaagannaaaagtaanttatatttnnnaaatnnnacttctantncattnnnanngggnnccncannnaaancatntnnantnntanannnncaantnaannaanatttaatntagtnaanaataanatnattnnntannaanaaaatnaatantntatntttnacttatannnnattatccnnatttnntntntnnnaattantnntttattnnnatanntctcattatantngtttctncgnttanntanatnttnatntgtntctanctnnatcnttaattnnaaatcatnanncatacatncnncaannacntanacttttcnnatatannaactatactancaatcatnatnaanatnanagannttttttaanngtantataantantaccncctgtattannactnctntagnatatgtctantcnaanattacntatactantatacncagatcngtntnatatcaattcnttttttnat

SEQ ID NO: 305 - DNA, 1667 bp, Homo Sapiens
  misc_feature (5)..(6): n is a, c, g, or t
  misc_feature (8)..(9): n is a, c, g, or t
  misc_feature (11)..(12): n is a, c, g, or t
  misc_feature (16)..(17): n is a, c, g, or t
  misc_feature (24)..(24): n is a, c, g, or t
  misc_feature (32)..(32): n is a, c, g, or t
  misc_feature (37)..(37): n is a, c, g, or t
  misc_feature (253)..(253): n is a, c, g, or t
  misc_feature (280)..(280): n is a, c, g, or t
  misc_feature (294)..(295): n is a, c, g, or t
  misc_feature (307)..(308): n is a, c, g, or t
  misc_feature (319)..(319): n is a, c, g, or t
  misc_feature (325)..(325): n is a, c, g, or t
  misc_feature (339)..(339): n is a, c, g, or t
  misc_feature (341)..(341): n is a, c, g, or t
  misc_feature (347)..(348): n is a, c, g, or t
  misc_feature (351)..(351): n is a, c, g, or t
  misc_feature (357)..(357): n is a, c, g, or t
  misc_feature (364)..(364): n is a, c, g, or t
  misc_feature (366)..(366): n is a, c, g, or t
  misc_feature (369)..(370): n is a, c, g, or t
  misc_feature (372)..(372): n is a, c, g, or t
  misc_feature (374)..(375): n is a, c, g, or t
  misc_feature (377)..(379): n is a, c, g, or t
  misc_feature (384)..(384): n is a, c, g, or t
  misc_feature (391)..(391): n is a, c, g, or t
  misc_feature (393)..(393): n is a, c, g, or t
  misc_feature (399)..(399): n is a, c, g, or t
  misc_feature (407)..(407): n is a, c, g, or t
  misc_feature (412)..(412): n is a, c, g, or t
  misc_feature (420)..(420): n is a, c, g, or t
  misc_feature (422)..(424): n is a, c, g, or t
  misc_feature (426)..(426): n is a, c, g, or t
  misc_feature (428)..(430): n is a, c, g, or t
  misc_feature (433)..(434): n is a, c, g, or t
  misc_feature (439)..(439): n is a, c, g, or t
  misc_feature (441)..(441): n is a, c, g, or t
  misc_feature (443)..(444): n is a, c, g, or t
  misc_feature (446)..(447): n is a, c, g, or t
  misc_feature (449)..(451): n is a, c, g, or t
  misc_feature (454)..(454): n is a, c, g, or t
  misc_feature (457)..(458): n is a, c, g, or t
  misc_feature (460)..(461): n is a, c, g, or t
  misc_feature (463)..(465): n is a, c, g, or t
  misc_feature (467)..(468): n is a, c, g, or t
  misc_feature (471)..(473): n is a, c, g, or t
  misc_feature (475)..(475): n is a, c, g, or t
  misc_feature (478)..(478): n is a, c, g, or t
  misc_feature (487)..(487): n is a, c, g, or t
  misc_feature (490)..(490): n is a, c, g, or t
  misc_feature (494)..(497): n is a, c, g, or t
  misc_feature (508)..(509): n is a, c, g, or t
  misc_feature (511)..(511): n is a, c, g, or t
  misc_feature (513)..(513): n is a, c, g, or t
  misc_feature (515)..(515): n is a, c, g, or t
  misc_feature (517)..(517): n is a, c, g, or t
  misc_feature (519)..(519): n is a, c, g, or t
  misc_feature (521)..(522): n is a, c, g, or t
  misc_feature (527)..(527): n is a, c, g, or t
  misc_feature (535)..(536): n is a, c, g, or t
  misc_feature (541)..(541): n is a, c, g, or t
  misc_feature (543)..(544): n is a, c, g, or t
  misc_feature (547)..(547): n is a, c, g, or t
  misc_feature (549)..(549): n is a, c, g, or t
  misc_feature (552)..(552): n is a, c, g, or t
  misc_feature (556)..(557): n is a, c, g, or t
  misc_feature (570)..(571): n is a, c, g, or t
  misc_feature (573)..(573): n is a, c, g, or t
  misc_feature (575)..(576): n is a, c, g, or t
  misc_feature (579)..(579): n is a, c, g, or t
  misc_feature (582)..(582): n is a, c, g, or t
  misc_feature (586)..(590): n is a, c, g, or t
  misc_feature (593)..(593): n is a, c, g, or t
  misc_feature (599)..(599): n is a, c, g, or t
  misc_feature (602)..(602): n is a, c, g, or t
  misc_feature (604)..(604): n is a, c, g, or t
  misc_feature (607)..(607): n is a, c, g, or t
  misc_feature (610)..(611): n is a, c, g, or t
  misc_feature (613)..(613): n is a, c, g, or t
  misc_feature (615)..(615): n is a, c, g, or t
  misc_feature (619)..(619): n is a, c, g, or t
  misc_feature (626)..(626): n is a, c, g, or t
  misc_feature (632)..(633): n is a, c, g, or t
  misc_feature (637)..(637): n is a, c, g, or t
  misc_feature (640)..(640): n is a, c, g, or t
  misc_feature (644)..(644): n is a, c, g, or t
  misc_feature (647)..(650): n is a, c, g, or t
  misc_feature (657)..(658): n is a, c, g, or t
  misc_feature (664)..(665): n is a, c, g, or t
  misc_feature (668)..(668): n is a, c, g, or t
  misc_feature (671)..(672): n is a, c, g, or t
  misc_feature (675)..(676): n is a, c, g, or t
  misc_feature (680)..(680): n is a, c, g, or t
  misc_feature (682)..(682): n is a, c, g, or t
  misc_feature (684)..(684): n is a, c, g, or t
  misc_feature (690)..(692): n is a, c, g, or t
  misc_feature (694)..(694): n is a, c, g, or t
  misc_feature (697)..(698): n is a, c, g, or t
  misc_feature (706)..(707): n is a, c, g, or t
  misc_feature (710)..(712): n is a, c, g, or t
  misc_feature (714)..(714): n is a, c, g, or t
  misc_feature (716)..(716): n is a, c, g, or t
  misc_feature (720)..(721): n is a, c, g, or t
  misc_feature (729)..(729): n is a, c, g, or t
  misc_feature (733)..(733): n is a, c, g, or t
  misc_feature (742)..(742): n is a, c, g, or t
  misc_feature (744)..(744): n is a, c, g, or t
  misc_feature (757)..(758): n is a, c, g, or t
  misc_feature (763)..(763): n is a, c, g, or t
  misc_feature (766)..(766): n is a, c, g, or t
  misc_feature (769)..(770): n is a, c, g, or t
  misc_feature (775)..(776): n is a, c, g, or t
  misc_feature (778)..(778): n is a, c, g, or t
  misc_feature (780)..(781): n is a, c, g, or t
  misc_feature (784)..(787): n is a, c, g, or t
  misc_feature (793)..(794): n is a, c, g, or t
  misc_feature (799)..(799): n is a, c, g, or t
  misc_feature (802)..(802): n is a, c, g, or t
  misc_feature (805)..(806): n is a, c, g, or t
  misc_feature (808)..(809): n is a, c, g, or t
  misc_feature (812)..(813): n is a, c, g, or t
  misc_feature (816)..(817): n is a, c, g, or t
  misc_feature (825)..(826): n is a, c, g, or t
  misc_feature (832)..(832): n is a, c, g, or t
  misc_feature (835)..(835): n is a, c, g, or t
  misc_feature (840)..(840): n is a, c, g, or t
  misc_feature (851)..(851): n is a, c, g, or t
  misc_feature (858)..(858): n is a, c, g, or t
  misc_feature (861)..(861): n is a, c, g, or t
  misc_feature (864)..(864): n is a, c, g, or t
  misc_feature (866)..(866): n is a, c, g, or t
  misc_feature (869)..(870): n is a, c, g, or t
  misc_feature (873)..(874): n is a, c, g, or t
  misc_feature (878)..(878): n is a, c, g, or t
  misc_feature (881)..(883): n is a, c, g, or t
  misc_feature (886)..(886): n is a, c, g, or t
  misc_feature (889)..(889): n is a, c, g, or t
  misc_feature (895)..(895): n is a, c, g, or t
  misc_feature (899)..(900): n is a, c, g, or t
  misc_feature (903)..(904): n is a, c, g, or t
  misc_feature (907)..(908): n is a, c, g, or t
  misc_feature (910)..(910): n is a, c, g, or t
  misc_feature (912)..(912): n is a, c, g, or t
  misc_feature (925)..(925): n is a, c, g, or t
  misc_feature (931)..(931): n is a, c, g, or t
  misc_feature (935)..(935): n is a, c, g, or t
  misc_feature (938)..(938): n is a, c, g, or t
  misc_feature (941)..(944): n is a, c, g, or t
  misc_feature (946)..(946): n is a, c, g, or t
  misc_feature (954)..(954): n is a, c, g, or t
  misc_feature (956)..(956): n is a, c, g, or t
  misc_feature (958)..(958): n is a, c, g, or t
  misc_feature (963)..(963): n is a, c, g, or t
  misc_feature (965)..(965): n is a, c, g, or t
  misc_feature (967)..(967): n is a, c, g, or t
  misc_feature (969)..(970): n is a, c, g, or t
  misc_feature (982)..(982): n is a, c, g, or t
  misc_feature (989)..(989): n is a, c, g, or t
  misc_feature (991)..(991): n is a, c, g, or t
  misc_feature (993)..(993): n is a, c, g, or t
  misc_feature (1002)..(1002): n is a, c, g, or t
  misc_feature (1017)..(1017): n is a, c, g, or t
  misc_feature (1021)..(1021): n is a, c, g, or t
  misc_feature (1029)..(1029): n is a, c, g, or t
  misc_feature (1033)..(1033): n is a, c, g, or t
  misc_feature (1039)..(1039): n is a, c, g, or t
  misc_feature (1047)..(1047): n is a, c, g, or t
  misc_feature (1058)..(1058): n is a, c, g, or t
  misc_feature (1061)..(1061): n is a, c, g, or t
  misc_feature (1065)..(1065): n is a, c, g, or t
  misc_feature (1078)..(1078): n is a, c, g, or t
  misc_feature (1095)..(1095): n is a, c, g, or t
  misc_feature (1101)..(1101): n is a, c, g, or t
  misc_feature (1103)..(1104): n is a, c, g, or t
  misc_feature (1106)..(1107): n is a, c, g, or t
  misc_feature (1110)..(1110): n is a, c, g, or t
  misc_feature (1116)..(1116): n is a, c, g, or t
  misc_feature (1119)..(1120): n is a, c, g, or t
  misc_feature (1122)..(1122): n is a, c, g, or t
  misc_feature (1126)..(1126): n is a, c, g, or t
  misc_feature (1128)..(1128): n is a, c, g, or t
  misc_feature (1130)..(1130): n is a, c, g, or t
  misc_feature (1134)..(1134): n is a, c, g, or t
  misc_feature (1136)..(1136): n is a, c, g, or t
  misc_feature (1144)..(1145): n is a, c, g, or t
  misc_feature (1150)..(1151): n is a, c, g, or t
  misc_feature (1158)..(1160): n is a, c, g, or t
  misc_feature (1162)..(1163): n is a, c, g, or t
  misc_feature (1166)..(1167): n is a, c, g, or t
  misc_feature (1175)..(1175): n is a, c, g, or t
  misc_feature (1179)..(1179): n is a, c, g, or t
  misc_feature (1181)..(1182): n is a, c, g, or t
  misc_feature (1189)..(1189): n is a, c, g, or t
  misc_feature (1196)..(1196): n is a, c, g, or t
  misc_feature (1198)..(1203): n is a, c, g, or t
  misc_feature (1205)..(1205): n is a, c, g, or t
  misc_feature (1215)..(1217): n is a, c, g, or t
  misc_feature (1220)..(1221): n is a, c, g, or t
  misc_feature (1224)..(1224): n is a, c, g, or t
  misc_feature (1227)..(1230): n is a, c, g, or t
  misc_feature (1232)..(1234): n is a, c, g, or t
  misc_feature (1236)..(1238): n is a, c, g, or t
  misc_feature (1240)..(1240): n is a, c, g, or t
  misc_feature (1244)..(1247): n is a, c, g, or t
  misc_feature (1252)..(1254): n is a, c, g, or t
  misc_feature (1258)..(1258): n is a, c, g, or t
  misc_feature (1262)..(1262): n is a, c, g, or t
  misc_feature (1266)..(1267): n is a, c, g, or t
  misc_feature (1269)..(1269): n is a, c, g, or t
  misc_feature (1271)..(1271): n is a, c, g, or t
  misc_feature (1277)..(1277): n is a, c, g, or t
  misc_feature (1284)..(1284): n is a, c, g, or t
  misc_feature (1293)..(1297): n is a, c, g, or t
  misc_feature (1299)..(1299): n is a, c, g, or t
  misc_feature (1303)..(1303): n is a, c, g, or t
  misc_feature (1312)..(1312): n is a, c, g, or t
  misc_feature (1314)..(1314): n is a, c, g, or t
  misc_feature (1319)..(1319): n is a, c, g, or t
  misc_feature (1330)..(1330): n is a, c, g, or t
  misc_feature (1332)..(1332): n is a, c, g, or t
  misc_feature (1352)..(1352): n is a, c, g, or t
  misc_feature (1354)..(1354): n is a, c, g, or t
  misc_feature (1360)..(1361): n is a, c, g, or t
  misc_feature (1377)..(1377): n is a, c, g, or t
  misc_feature (1382)..(1382): n is a, c, g, or t
  misc_feature (1397)..(1397): n is a, c, g, or t
  misc_feature (1400)..(1401): n is a, c, g, or t
  misc_feature (1403)..(1403): n is a, c, g, or t
  misc_feature (1405)..(1405): n is a, c, g, or t
  misc_feature (1410)..(1410): n is a, c, g, or t
  misc_feature (1414)..(1416): n is a, c, g, or t
  misc_feature (1418)..(1419): n is a, c, g, or t
  misc_feature (1428)..(1428): n is a, c, g, or t
  misc_feature (1430)..(1430): n is a, c, g, or t
  misc_feature (1438)..(1438): n is a, c, g, or t
  misc_feature (1443)..(1444): n is a, c, g, or t
  misc_feature (1446)..(1446): n is a, c, g, or t
  misc_feature (1449)..(1451): n is a, c, g, or t
  misc_feature (1457)..(1457): n is a, c, g, or t
  misc_feature (1463)..(1463): n is a, c, g, or t
  misc_feature (1465)..(1465): n is a, c, g, or t
  misc_feature (1469)..(1469): n is a, c, g, or t
  misc_feature (1484)..(1484): n is a, c, g, or t
  misc_feature (1486)..(1486): n is a, c, g, or t
  misc_feature (1488)..(1488): n is a, c, g, or t
  misc_feature (1491)..(1492): n is a, c, g, or t
  misc_feature (1495)..(1495): n is a, c, g, or t
  misc_feature (1500)..(1500): n is a, c, g, or t
  misc_feature (1502)..(1504): n is a, c, g, or t
  misc_feature (1508)..(1509): n is a, c, g, or t
  misc_feature (1513)..(1513): n is a, c, g, or t
  misc_feature (1516)..(1516): n is a, c, g, or t
  misc_feature (1521)..(1521): n is a, c, g, or t
  misc_feature (1525)..(1525): n is a, c, g, or t
  misc_feature (1528)..(1530): n is a, c, g, or t
  misc_feature (1532)..(1532): n is a, c, g, or t
  misc_feature (1535)..(1535): n is a, c, g, or t
  misc_feature (1553)..(1554): n is a, c, g, or t
  misc_feature (1559)..(1559): n is a, c, g, or t
  misc_feature (1561)..(1561): n is a, c, g, or t
  misc_feature (1565)..(1565): n is a, c, g, or t
  misc_feature (1568)..(1568): n is a, c, g, or t
  misc_feature (1570)..(1570): n is a, c, g, or t
  misc_feature (1572)..(1572): n is a, c, g, or t
  misc_feature (1574)..(1574): n is a, c, g, or t
  misc_feature (1576)..(1576): n is a, c, g, or t
  misc_feature (1583)..(1583): n is a, c, g, or t
  misc_feature (1595)..(1595): n is a, c, g, or t
  misc_feature (1597)..(1597): n is a, c, g, or t
  misc_feature (1599)..(1600): n is a, c, g, or t
  misc_feature (1603)..(1604): n is a, c, g, or t
  misc_feature (1611)..(1611): n is a, c, g, or t
  misc_feature (1617)..(1617): n is a, c, g, or t
  misc_feature (1620)..(1621): n is a, c, g, or t
  misc_feature (1624)..(1625): n is a, c, g, or t
  misc_feature (1628)..(1628): n is a, c, g, or t
  misc_feature (1630)..(1630): n is a, c, g, or t
  misc_feature (1636)..(1636): n is a, c, g, or t
  misc_feature (1642)..(1642): n is a, c, g, or t
  misc_feature (1649)..(1649): n is a, c, g, or t
  misc_feature (1655)..(1657): n is a, c, g, or t
  misc_feature (1665)..(1665): n is a, c, g, or t
  misc_feature (1667)..(1667): n is a, c, g, or t
ccccnnanngnnaatnntttttanaggatcgnatcancatcaccatcacgggatcctatttaggtgacactatagaatcgtcgacccacgcgtccggcaccgacgagctggggcccccagggcggctggagggcgcgccccggcccgtggcccgcgagaagacctcgctgggcagcctgaagcgcgccagcgtggacgtggacctgctggccccgcgcagccccatggccaaggagaacatggtgaccttcanccacacgctgcccagggatcagcgcgncctcgctggacgannccgcgcgccgcnncatgaccatcnacgtgncgctggatgcctcncnctccanncanctcatnagctatngnaannanannannntgtanaggccanangcctgntgctgctnttaanaacactantnnnangnnnacnntgatntngnntnncnnncantanntnntnnntnntannnanttntaaataatnatnttcnnnnaaatcattaannantntngnantnnttganattatttnngagantnnaangngtnctanntattcttttctanntnannttnaantcannnnntanaaaganatnanttnagnntncntatntctttanaataannattnatntttnaannnnctatttnnatgttnnatnacnnaannattngntnatactnnnanttnnttatacanngannntntnaaannaatcattnatcntttctttantntttatatattcannttttnttntanntttannananncannnntttatnnattanctntanntnnatnnatnnttaaattnnatattnttnataantttttaaaaanattatcnacntantntcnnatnntaanaannnaantanaatcantttnnctnnttnntnantttattttataanatcttnattnttnatnnnntntaatattncntnttatntntnanntaattcttttantctttanantnactattctncatatatttttaaanattnatgtatanaaanttaatnatttaaanttataatatcnatnattnttattcaacattnttaaatttatcttattnatttantnntnnctnattctntanntnattntntnattntnctattaannatagnntaaattnnnannatnntttatatnacancnnatttaanttttttncnnnnnnancaataattgnnnatnntanttnnnncnnnannntnaccnnnnataannnaatncttntcanntntnaatttnaccttanttttatttnnnnnantttntaattaatntnaatangaaccattttntnttcctatctatatttctatncntcatannatagataatattgttnttctnctatatctatatcanttnntngntaacnacannntnntatattttnancaacttcnaaatnnangtnnntgacancttctntnacantaaaaattatatttncntnctnnatnttaantnnncatnnaaanttntatantttntannntnaanctttttaactaatatcanntttantnaaanaananantnantaaaatntcaatttttcancncnntgnnaaattanattacntcnnttnnatnanactacnaaaaanataaacnatcaannntcttattntn

SEQ ID NO: 306 - DNA, 1412 bp, Homo Sapiens
  misc_feature (4)..(7): n is a, c, g, or t
  misc_feature (9)..(9): n is a, c, g, or t
  misc_feature (11)..(11): n is a, c, g, or t
  misc_feature (17)..(17): n is a, c, g, or t
  misc_feature (562)..(562): n is a, c, g, or t
  misc_feature (601)..(601): n is a, c, g, or t
  misc_feature (604)..(604): n is a, c, g, or t
  misc_feature (621)..(621): n is a, c, g, or t
  misc_feature (627)..(627): n is a, c, g, or t
  misc_feature (634)..(634): n is a, c, g, or t
  misc_feature (667)..(667): n is a, c, g, or t
  misc_feature (723)..(723): n is a, c, g, or t
  misc_feature (730)..(730): n is a, c, g, or t
  misc_feature (732)..(732): n is a, c, g, or t
  misc_feature (743)..(743): n is a, c, g, or t
  misc_feature (756)..(756): n is a, c, g, or t
  misc_feature (758)..(758): n is a, c, g, or t
  misc_feature (761)..(761): n is a, c, g, or t
  misc_feature (767)..(768): n is a, c, g, or t
  misc_feature (770)..(770): n is a, c, g, or t
  misc_feature (772)..(772): n is a, c, g, or t
  misc_feature (775)..(775): n is a, c, g, or t
  misc_feature (785)..(785): n is a, c, g, or t
  misc_feature (793)..(794): n is a, c, g, or t
  misc_feature (797)..(798): n is a, c, g, or t
  misc_feature (804)..(806): n is a, c, g, or t
  misc_feature (812)..(812): n is a, c, g, or t
  misc_feature (814)..(815): n is a, c, g, or t
  misc_feature (837)..(837): n is a, c, g, or t
  misc_feature (847)..(847): n is a, c, g, or t
  misc_feature (851)..(853): n is a, c, g, or t
  misc_feature (860)..(860): n is a, c, g, or t
  misc_feature (869)..(869): n is a, c, g, or t
  misc_feature (871)..(872): n is a, c, g, or t
  misc_feature (875)..(876): n is a, c, g, or t
  misc_feature (878)..(878): n is a, c, g, or t
  misc_feature (881)..(882): n is a, c, g, or t
  misc_feature (886)..(886): n is a, c, g, or t
  misc_feature (890)..(891): n is a, c, g, or t
  misc_feature (894)..(894): n is a, c, g, or t
  misc_feature (897)..(897): n is a, c, g, or t
  misc_feature (904)..(905): n is a, c, g, or t
  misc_feature (907)..(908): n is a, c, g, or t
  misc_feature (910)..(914): n is a, c, g, or t
  misc_feature (918)..(919): n is a, c, g, or t
  misc_feature (921)..(922): n is a, c, g, or t
  misc_feature (926)..(927): n is a, c, g, or t
  misc_feature (929)..(929): n is a, c, g, or t
  misc_feature (932)..(934): n is a, c, g, or t
  misc_feature (939)..(939): n is a, c, g, or t
  misc_feature (942)..(943): n is a, c, g, or t
  misc_feature (945)..(946): n is a, c, g, or t
  misc_feature (949)..(950): n is a, c, g, or t
  misc_feature (952)..(953): n is a, c, g, or t
  misc_feature (955)..(955): n is a, c, g, or t
  misc_feature (958)..(958): n is a, c, g, or t
  misc_feature (962)..(962): n is a, c, g, or t
  misc_feature (964)..(965): n is a, c, g, or t
  misc_feature (972)..(973): n is a, c, g, or t
  misc_feature (976)..(978): n is a, c, g, or t
  misc_feature (980)..(982): n is a, c, g, or t
  misc_feature (984)..(984): n is a, c, g, or t
  misc_feature (986)..(987): n is a, c, g, or t
  misc_feature (992)..(992): n is a, c, g, or t
  misc_feature (995)..(1000): n is a, c, g, or t
  misc_feature (1002)..(1002): n is a, c, g, or t
  misc_feature (1005)..(1006): n is a, c, g, or t
  misc_feature (1009)..(1009): n is a, c, g, or t
  misc_feature (1011)..(1011): n is a, c, g, or t
  misc_feature (1013)..(1013): n is a, c, g, or t
  misc_feature (1016)..(1016): n is a, c, g, or t
  misc_feature (1018)..(1019): n is a, c, g, or t
  misc_feature (1021)..(1021): n is a, c, g, or t
  misc_feature (1023)..(1024): n is a, c, g, or t
  misc_feature (1027)..(1027): n is a, c, g, or t
  misc_feature (1029)..(1029): n is a, c, g, or t
  misc_feature (1032)..(1032): n is a, c, g, or t
  misc_feature (1034)..(1034): n is a, c, g, or t
  misc_feature (1036)..(1036): n is a, c, g, or t
  misc_feature (1038)..(1038): n is a, c, g, or t
  misc_feature (1042)..(1042): n is a, c, g, or t
  misc_feature (1044)..(1046): n is a, c, g, or t
  misc_feature (1050)..(1050): n is a, c, g, or t
  misc_feature (1054)..(1054): n is a, c, g, or t
  misc_feature (1056)..(1056): n is a, c, g, or t
  misc_feature (1059)..(1059): n is a, c, g, or t
  misc_feature (1062)..(1064): n is a, c, g, or t
  misc_feature (1068)..(1068): n is a, c, g, or t
  misc_feature (1070)..(1071): n is a, c, g, or t
  misc_feature (1074)..(1074): n is a, c, g, or t
  misc_feature (1078)..(1078): n is a, c, g, or t
  misc_feature (1080)..(1081): n is a, c, g, or t
  misc_feature (1083)..(1083): n is a, c, g, or t
  misc_feature (1087)..(1089): n is a, c, g, or t
  misc_feature (1092)..(1092): n is a, c, g, or t
  misc_feature (1095)..(1098): n is a, c, g, or t
  misc_feature (1102)..(1102): n is a, c, g, or t
  misc_feature (1106)..(1106): n is a, c, g, or t
  misc_feature (1109)..(1109): n is a, c, g, or t
  misc_feature (1111)..(1113): n is a, c, g, or t
  misc_feature (1116)..(1117): n is a, c, g, or t
  misc_feature (1120)..(1121): n is a, c, g, or t
  misc_feature (1123)..(1123): n is a, c, g, or t
  misc_feature (1126)..(1126): n is a, c, g, or t
  misc_feature (1129)..(1132): n is a, c, g, or t
  misc_feature (1134)..(1135): n is a, c, g, or t
  misc_feature (1138)..(1138): n is a, c, g, or t
  misc_feature (1140)..(1144): n is a, c, g, or t
  misc_feature (1151)..(1151): n is a, c, g, or t
  misc_feature (1155)..(1155): n is a, c, g, or t
  misc_feature (1161)..(1163): n is a, c, g, or t
  misc_feature (1166)..(1166): n is a, c, g, or t
  misc_feature (1169)..(1169): n is a, c, g, or t
  misc_feature (1171)..(1175): n is a, c, g, or t
  misc_feature (1178)..(1180): n is a, c, g, or t
  misc_feature (1182)..(1183): n is a, c, g, or t
  misc_feature (1185)..(1187): n is a, c, g, or t
  misc_feature (1189)..(1190): n is a, c, g, or t
  misc_feature (1194)..(1194): n is a, c, g, or t
  misc_feature (1196)..(1201): n is a, c, g, or t
  misc_feature (1207)..(1207): n is a, c, g, or t
  misc_feature (1210)..(1210): n is a, c, g, or t
  misc_feature (1212)..(1214): n is a, c, g, or t
  misc_feature (1216)..(1217): n is a, c, g, or t
  misc_feature (1220)..(1222): n is a, c, g, or t
  misc_feature (1224)..(1226): n is a, c, g, or t
  misc_feature (1228)..(1228): n is a, c, g, or t
  misc_feature (1230)..(1230): n is a, c, g, or t
  misc_feature (1233)..(1242): n is a, c, g, or t
  misc_feature (1249)..(1250): n is a, c, g, or t
  misc_feature (1253)..(1254): n is a, c, g, or t
  misc_feature (1256)..(1256): n is a, c, g, or t
  misc_feature (1258)..(1258): n is a, c, g, or t
  misc_feature (1262)..(1262): n is a, c, g, or t
  misc_feature (1267)..(1267): n is a, c, g, or t
  misc_feature (1270)..(1270): n is a, c, g, or t
  misc_feature (1272)..(1273): n is a, c, g, or t
  misc_feature (1275)..(1277): n is a, c, g, or t
  misc_feature (1279)..(1279): n is a, c, g, or t
  misc_feature (1282)..(1282): n is a, c, g, or t
  misc_feature (1285)..(1286): n is a, c, g, or t
  misc_feature (1288)..(1288): n is a, c, g, or t
  misc_feature (1292)..(1292): n is a, c, g, or t
  misc_feature (1294)..(1295): n is a, c, g, or t
  misc_feature (1298)..(1298): n is a, c, g, or t
  misc_feature (1300)..(1300): n is a, c, g, or t
  misc_feature (1303)..(1304): n is a, c, g, or t
  misc_feature (1306)..(1306): n is a, c, g, or t
  misc_feature (1309)..(1311): n is a, c, g, or t
  misc_feature (1313)..(1315): n is a, c, g, or t
  misc_feature (1317)..(1319): n is a, c, g, or t
  misc_feature (1321)..(1321): n is a, c, g, or t
  misc_feature (1324)..(1325): n is a, c, g, or t
  misc_feature (1329)..(1330): n is a, c, g, or t
  misc_feature (1334)..(1334): n is a, c, g, or t
  misc_feature (1337)..(1338): n is a, c, g, or t
  misc_feature (1340)..(1340): n is a, c, g, or t
  misc_feature (1342)..(1343): n is a, c, g, or t
  misc_feature (1345)..(1345): n is a, c, g, or t
  misc_feature (1348)..(1351): n is a, c, g, or t
  misc_feature (1355)..(1355): n is a, c, g, or t
  misc_feature (1357)..(1357): n is a, c, g, or t
  misc_feature (1361)..(1363): n is a, c, g, or t
  misc_feature (1365)..(1367): n is a, c, g, or t
  misc_feature (1369)..(1370): n is a, c, g, or t
  misc_feature (1372)..(1373): n is a, c, g, or t
  misc_feature (1375)..(1379): n is a, c, g, or t
  misc_feature (1382)..(1383): n is a, c, g, or t
  misc_feature (1385)..(1385): n is a, c, g, or t
  misc_feature (1387)..(1387): n is a, c, g, or t
  misc_feature (1390)..(1393): n is a, c, g, or t
  misc_feature (1395)..(1398): n is a, c, g, or t
  misc_feature (1400)..(1403): n is a, c, g, or t
  misc_feature (1406)..(1406): n is a, c, g, or t
  misc_feature (1408)..(1408): n is a, c, g, or t
  misc_feature (1412)..(1412): n is a, c, g, or t
ccannnngngnaattanctatgagaggatcgcatcaccatcaccatcacggatcctatttaggtgacactatagaatcgtcgacccacgcgtccggcggccccatgggcaacatcatgatcgatcctgtcctcggtaccgtgggctttgggtctggcctccacgggtgggccttcaccctgaagcagtttgccgagatgtatgtggccaagttcgccgccaagggggagggccagttggggcctgccgagcgggccaagaaagtagaggacatgatgaagaagctgtggggtgacaggtactttgacccagccaacggcaagttcagcaagtcagccaccagccccgaagggaagaagctgccacgcaccttctgccagctgatcctggaccccatcttcaaggtgtttgatgcgatcatgaatttcaagaaagaggagacagcaaaactgatagagaaactggacatcaaactggacagcgaggacaaggacaaagaaggcaaacccctgctgaaggctgtgatgcgccgctggctgcctgccggagacgccttgttgcanatgatcaccatccacctgccctcccctgtgacggcccanaantaccgctgcgaagctcntgtacnaggggcncccggacgacgaggctgccatgggcattaaaanctgtgaccccaaaggccctcttatgatgtatatttccaaaagggtgccaacctccnaaaaaangncgagttctacncctttggaacaantnttnctcggnntngnctncactgacctnaaggatannganncatagnnncccaantnnaccccctgggaaaaaaaagaanacctctaacntgannncaaatcnaaaaaaaantnnttnntnaanntccncaanntgnaancccattnnannannnnncttnnannaaanntntannntcctnttnnannttnnannanttnctgntnnaaaaaannatnnntnnnancnntattnaannnnnntnaannaantntnatntnnanannttntnatnantncntatnannnaatnttcntntanttnnnatantnnatntaantnncnaaannnatnaannnntaanaaantantnnnttnnaanncntantannnnanntanannnnnttataanaatnctattnnnctnttntnnnnnaannntnntnnntnnattntnnnnnntttatnaanannnannttnnntnnnanantannnnnnnnnntaattanntannantnaatnaaaanaantnntnnntnatnatnnanaaantnntantnatnntnttnnntnnnannntnttnnaaannaatntannantnntnaannnnattntnattnnntnnnannanntnnnnnatnnantnttnnnnannnntnnnnttnanatan

SEQ ID NO: 307 - DNA, 1359 bp, Homo Sapiens
  misc_feature (1)..(1): n is a, c, g, or t
  misc_feature (887)..(887): n is a, c, g, or t
  misc_feature (947)..(947): n is a, c, g, or t
  misc_feature (950)..(950): n is a, c, g, or t
  misc_feature (955)..(955): n is a, c, g, or t
  misc_feature (971)..(971): n is a, c, g, or t
  misc_feature (1009)..(1009): n is a, c, g, or t
  misc_feature (1021)..(1021): n is a, c, g, or t
  misc_feature (1023)..(1023): n is a, c, g, or t
  misc_feature (1037)..(1037): n is a, c, g, or t
  misc_feature (1045)..(1045): n is a, c, g, or t
  misc_feature (1050)..(1050): n is a, c, g, or t
  misc_feature (1061)..(1061): n is a, c, g, or t
  misc_feature (1067)..(1067): n is a, c, g, or t
  misc_feature (1071)..(1071): n is a, c, g, or t
  misc_feature (1082)..(1082): n is a, c, g, or t
  misc_feature (1090)..(1090): n is a, c, g, or t
  misc_feature (1092)..(1093): n is a, c, g, or t
  misc_feature (1096)..(1096): n is a, c, g, or t
  misc_feature (1101)..(1101): n is a, c, g, or t
  misc_feature (1105)..(1105): n is a, c, g, or t
  misc_feature (1107)..(1107): n is a, c, g, or t
  misc_feature (1109)..(1109): n is a, c, g, or t
  misc_feature (1113)..(1113): n is a, c, g, or t
  misc_feature (1115)..(1115): n is a, c, g, or t
  misc_feature (1122)..(1122): n is a, c, g, or t
  misc_feature (1125)..(1125): n is a, c, g, or t
  misc_feature (1137)..(1137): n is a, c, g, or t
  misc_feature (1139)..(1139): n is a, c, g, or t
  misc_feature (1146)..(1147): n is a, c, g, or t
  misc_feature (1155)..(1156): n is a, c, g, or t
  misc_feature (1161)..(1161): n is a, c, g, or t
  misc_feature (1175)..(1175): n is a, c, g, or t
  misc_feature (1184)..(1184): n is a, c, g, or t
  misc_feature (1189)..(1189): n is a, c, g, or t
  misc_feature (1191)..(1192): n is a, c, g, or t
  misc_feature (1200)..(1200): n is a, c, g, or t
  misc_feature (1213)..(1213): n is a, c, g, or t
  misc_feature (1222)..(1222): n is a, c, g, or t
  misc_feature (1227)..(1227): n is a, c, g, or t
  misc_feature (1229)..(1229): n is a, c, g, or t
  misc_feature (1239)..(1239): n is a, c, g, or t
  misc_feature (1241)..(1242): n is a, c, g, or t
  misc_feature (1253)..(1253): n is a, c, g, or t
  misc_feature (1261)..(1261): n is a, c, g, or t
  misc_feature (1271)..(1271): n is a, c, g, or t
  misc_feature (1281)..(1281): n is a, c, g, or t
  misc_feature (1285)..(1285): n is a, c, g, or t
  misc_feature (1298)..(1298): n is a, c, g, or t
  misc_feature (1307)..(1307): n is a, c, g, or t
  misc_feature (1310)..(1310): n is a, c, g, or t
  misc_feature (1319)..(1319): n is a, c, g, or t
  misc_feature (1322)..(1322): n is a, c, g, or t
  misc_feature (1327)..(1327): n is a, c, g, or t
  misc_feature (1335)..(1335): n is a, c, g, or t
  misc_feature (1342)..(1342): n is a, c, g, or t
  misc_feature (1347)..(1347): n is a, c, g, or t
  misc_feature (1353)..(1353): n is a, c, g, or t
naaatagagaaattactatgagaggatcgcatcaccatcaccatcacggatcctatttaggtgacactatagaatcgtcgacccacgcgtccggcgagaatgaagactattctcagcaatcagactgtcgacattccagaaaatgtcgacattactctgaagggacgcacagttatcgtgaagggccccagaggaaccctgcggagggacttcaatcacatcaatgtagaactcagccttcttggaaagaaaaaaaagaggctccgggttgacaaatggtggggtaacagaaaggaactggctaccgttcggactatttgtagtcatgtacagaacatgatcaagggtgttacactgggcttccgttacaagatgaggtctgtgtatgctcacttccccatcaacgttgttatccaggagaatgggtctcttgttgaaatccgaaatttcttgggtgaaaaatacatccgcagggttcggatgagaccaggtgttgcttgttcagtatctcaagcccagaaagatgaattaatccttgaaggaaatgacattgagcttgtttcaaattcagcggctttgattcagcaagccacaacagttaaaaacaaggatatcaggaaatttttggatggtatctatgtctctgaaaaaggaactgttcagcaggctgatgaataagatctaagagttacctggctacagaaagaagatgccagatgacacttaagacctacttgtgatatttaaatgatgcaataaaagacctattgatttggaaaaaaaaaaaaaaaaaaaaaaaaaaagggcggccgctccctatagtgagtcgtattaagcttaattagctgagcttggactcctgttgatagatccagtaatgacctcanaactccatctggatttgttcaaaacgctcggttgccgccgggcgttttttattggggganaantccangctagcttggcgagantttcaggagctaaggaagctaaatggaaaaaaaaatcnctggatataccncngttgaaatatccantggcatcntaaanaaattttgagncattcngtcngttgctcatgnacctaaancnnacngtcanctgnantnacgncnttttaanacntaaaaaaaaaancnaagtttnnccgccttnntccanttttgccccccgangaaggcccnccgantnntaggcaanaaaaaagggaccngggaaaggnaaagntncccctgttancnntttccagaaanaaagaaantttttccccnggggaaaacnaaantccggggtttccnaaatttccnaanggggggtgnggnaaccncctttccnagggttnaaaantttttncccccc

SEQ ID NO: 308 - DNA, 1391 bp, Homo Sapiens
  misc_feature (1)..(1): n is a, c, g, or t
  misc_feature (778)..(778): n is a, c, g, or t
  misc_feature (841)..(841): n is a, c, g, or t
  misc_feature (874)..(874): n is a, c, g, or t
  misc_feature (879)..(879): n is a, c, g, or t
  misc_feature (884)..(884): n is a, c, g, or t
  misc_feature (958)..(958): n is a, c, g, or t
  misc_feature (962)..(962): n is a, c, g, or t
  misc_feature (979)..(979): n is a, c, g, or t
  misc_feature (982)..(982): n is a, c, g, or t
  misc_feature (986)..(989): n is a, c, g, or t
  misc_feature (996)..(996): n is a, c, g, or t
  misc_feature (999)..(999): n is a, c, g, or t
  misc_feature (1002)..(1002): n is a, c, g, or t
  misc_feature (1022)..(1022): n is a, c, g, or t
  misc_feature (1024)..(1024): n is a, c, g, or t
  misc_feature (1028)..(1028): n is a, c, g, or t
  misc_feature (1043)..(1043): n is a, c, g, or t
  misc_feature (1070)..(1070): n is a, c, g, or t
  misc_feature (1072)..(1075): n is a, c, g, or t
  misc_feature (1081)..(1081): n is a, c, g, or t
  misc_feature (1086)..(1086): n is a, c, g, or t
  misc_feature (1088)..(1088): n is a, c, g, or t
  misc_feature (1095)..(1095): n is a, c, g, or t
  misc_feature (1102)..(1102): n is a, c, g, or t
  misc_feature (1116)..(1116): n is a, c, g, or t
  misc_feature (1119)..(1119): n is a, c, g, or t
  misc_feature (1134)..(1134): n is a, c, g, or t
  misc_feature (1145)..(1145): n is a, c, g, or t
  misc_feature (1152)..(1152): n is a, c, g, or t
  misc_feature (1159)..(1159): n is a, c, g, or t
  misc_feature (1163)..(1164): n is a, c, g, or t
  misc_feature (1172)..(1172): n is a, c, g, or t
  misc_feature (1182)..(1182): n is a, c, g, or t
  misc_feature (1202)..(1202): n is a, c, g, or t
  misc_feature (1212)..(1212): n is a, c, g, or t
  misc_feature (1216)..(1216): n is a, c, g, or t
  misc_feature (1224)..(1224): n is a, c, g, or t
  misc_feature (1227)..(1228): n is a, c, g, or t
  misc_feature (1231)..(1231): n is a, c, g, or t
  misc_feature (1233)..(1233): n is a, c, g, or t
  misc_feature (1237)..(1237): n is a, c, g, or t
  misc_feature (1244)..(1244): n is a, c, g, or t
  misc_feature (1256)..(1256): n is a, c, g, or t
  misc_feature (1264)..(1265): n is a, c, g, or t
  misc_feature (1277)..(1277): n is a, c, g, or t
  misc_feature (1279)..(1279): n is a, c, g, or t
  misc_feature (1284)..(1284): n is a, c, g, or t
  misc_feature (1291)..(1291): n is a, c, g, or t
  misc_feature (1293)..(1293): n is a, c, g, or t
  misc_feature (1297)..(1298): n is a, c, g, or t
  misc_feature (1321)..(1321): n is a, c, g, or t
  misc_feature (1327)..(1327): n is a, c, g, or t
  misc_feature (1330)..(1330): n is a, c, g, or t
  misc_feature (1334)..(1334): n is a, c, g, or t
  misc_feature (1340)..(1340): n is a, c, g, or t
  misc_feature (1342)..(1343): n is a, c, g, or t
  misc_feature (1347)..(1347): n is a, c, g, or t
  misc_feature (1352)..(1352): n is a, c, g, or t
  misc_feature (1358)..(1358): n is a, c, g, or t
  misc_feature (1360)..(1360): n is a, c, g, or t
  misc_feature (1372)..(1373): n is a, c, g, or t
  misc_feature (1375)..(1376): n is a, c, g, or t
  misc_feature (1384)..(1385): n is a, c, g, or t
  misc_feature (1391)..(1391): n is a, c, g, or t
naatagagaaattactatgagaggatcgcatcaccatcaccatcacggatcctatttaggtgacactatagaatcgtcgacccacgcgtccgcggacgcgtggggccaactctcgcactctgttcttccgccgctccgccgtcgcgtttctctgccggtcgcaatggaagaagagatcgccgcgctggtcattgacaatggctccggcatgtgcaaagctggttttgctggggacgacgctccccgagccgtgtttccttccatcgtcgggcgccccagacaccagggcgtcatggtgggcatgggccagaaggactcctacgtgggcgacgaggcccagagcaagcgtggcatcctgaccctgaagtaccccattgagcatggcatcgtcaccaactgggacgacatggagaagatctggcaccacaccttctacaacgagctgcgcgtggccccggaggagcacccagtgctgctgaccgaggcccccctgaaccccaaggccaacagagagaagatgactcagattatgtttgagaccttcaacaccccggccatgtacgtggccatccaggccgtgctgtccctctacgcctctgggcgcaccactggcattgtcatggactctggagacggggtcacccacacggtgcccatctacgagggctacgccctcccccacgccatcctgcgtctggacctggctggccgggacctgaccgactacctcatgaagatcctcactgagcgaggctacagcttcaccaccacggccgancgggaaatcgtgcgcgacatcaaggagaagctgtgctacgtcgccctggacttcgagcagganatggccaccgccgcatcctcctcttctctgganaaaanctacnagctgcccgatggccaggtcatcaccattggcaatgaacggttccggtgtccggaggccctgttccagctttcnttcntgggtatggaatcttgnggnatcnnnnaaacacnttnaantccatcatgaaatgggacgngnaatncccaaaaactgtacncaaacgggggttttcgggggggcaccncnnnntatccngggcntntccaaanggatgcnaaaagaaatccccnccntggcccccccccccntgaaaataaanaatttcnccccccnaaanncaaaaaancgggggaatngggggtccttctgggccccntgtccccttncccnaaaagggnttnncancngganaaaaaanttgggccccctntttccccnnaattttttaaangnttccnaaagggnantttnngggggggaattaaaaaaaaattncccggnaanaaancccttntnncccnaaaanaaaaancncaaaaaattttnntnnttttatanncgggtn

SEQ ID NO: 309 - DNA, 1435 bp, Homo Sapiens
  misc_feature (755)..(755): n is a, c, g, or t
  misc_feature (925)..(925): n is a, c, g, or t
  misc_feature (928)..(928): n is a, c, g, or t
  misc_feature (945)..(945): n is a, c, g, or t
  misc_feature (977)..(977): n is a, c, g, or t
  misc_feature (998)..(998): n is a, c, g, or t
  misc_feature (1045)..(1045): n is a, c, g, or t
  misc_feature (1058)..(1058): n is a, c, g, or t
  misc_feature (1061)..(1061): n is a, c, g, or t
  misc_feature (1065)..(1065): n is a, c, g, or t
  misc_feature (1069)..(1069): n is a, c, g, or t
  misc_feature (1075)..(1075): n is a, c, g, or t
  misc_feature (1120)..(1120): n is a, c, g, or t
  misc_feature (1130)..(1130): n is a, c, g, or t
  misc_feature (1135)..(1135): n is a, c, g, or t
  misc_feature (1137)..(1137): n is a, c, g, or t
  misc_feature (1142)..(1142): n is a, c, g, or t
  misc_feature (1151)..(1151): n is a, c, g, or t
  misc_feature (1155)..(1155): n is a, c, g, or t
  misc_feature (1159)..(1159): n is a, c, g, or t
  misc_feature (1179)..(1180): n is a, c, g, or t
  misc_feature (1199)..(1199): n is a, c, g, or t
  misc_feature (1205)..(1205): n is a, c, g, or t
  misc_feature (1209)..(1211): n is a, c, g, or t
  misc_feature (1213)..(1213): n is a, c, g, or t
  misc_feature (1217)..(1218): n is a, c, g, or t
  misc_feature (1226)..(1226): n is a, c, g, or t
  misc_feature (1232)..(1232): n is a, c, g, or t
  misc_feature (1235)..(1235): n is a, c, g, or t
  misc_feature (1239)..(1239): n is a, c, g, or t
  misc_feature (1241)..(1242): n is a, c, g, or t
  misc_feature (1261)..(1261): n is a, c, g, or t
  misc_feature (1269)..(1269): n is a, c, g, or t
  misc_feature (1272)..(1272): n is a, c, g, or t
  misc_feature (1276)..(1276): n is a, c, g, or t
  misc_feature (1283)..(1283): n is a, c, g, or t
  misc_feature (1297)..(1297): n is a, c, g, or t
  misc_feature (1300)..(1300): n is a, c, g, or t
  misc_feature (1302)..(1303): n is a, c, g, or t
  misc_feature (1321)..(1322): n is a, c, g, or t
  misc_feature (1326)..(1329): n is a, c, g, or t
  misc_feature (1331)..(1331): n is a, c, g, or t
  misc_feature (1335)..(1335): n is a, c, g, or t
  misc_feature (1337)..(1337): n is a, c, g, or t
  misc_feature (1339)..(1339): n is a, c, g, or t
  misc_feature (1344)..(1344): n is a, c, g, or t
  misc_feature (1346)..(1346): n is a, c, g, or t
  misc_feature (1350)..(1350): n is a, c, g, or t
  misc_feature (1358)..(1358): n is a, c, g, or t
  misc_feature (1366)..(1367): n is a, c, g, or t
  misc_feature (1369)..(1370): n is a, c, g, or t
  misc_feature (1382)..(1384): n is a, c, g, or t
  misc_feature (1393)..(1393): n is a, c, g, or t
  misc_feature (1396)..(1397): n is a, c, g, or t
  misc_feature (1405)..(1406): n is a, c, g, or t
  misc_feature (1413)..(1413): n is a, c, g, or t
  misc_feature (1428)..(1428): n is a, c, g, or t
  misc_feature (1434)..(1434): n is a, c, g, or t
aattagagaaattactatgagaggatcgcatcaccatcaccatcacggatcctatttaggtgacactatagaatcgtcgacccacgcgtccgaaccacctggtgtcggccaccatgagcggggtcaccacctgcctgcgcttcccgggccagctgaacgcagacctgcgcaagctggcggtgaacatggtgcccttccctcgcctgcacttcttcatgcccggcttcgcgcccctgaccagccggggcagccagcagtaccgggcgctcacggtgcccgagctcacccagcagatgttcgactccaagaacatgatggccgcctgcgacccgcgccacggccgctacctgacggtggctgccatcttccggggccgcatgtccatgaaggaggtggacgagcagatgctcaacgtgcagaacaagaacagcagctacttcgtggagtggatccccaacaacgtgaagacggccgtgtgcgacatcccgccccgcggcctgaagatgtcggccaccttcatcggcaacagcacggccatccaggagctgttcaagcgcatctccgagcagttcacggccatgttccggcgcaaggccttcctgcactggtacacgggcgagggcatggacgagatggagttcaccgaggccgagagcaacatgaacgacctggtgtccgagtaccagcagtaccaggacgccacggccgacgaacaaggggagttcgaggaggaggagggcgaggacgaggcgtanatgcccccgcgagacgggttagggaaagcggaggaagaaagcgagggggtggggggcttcccgggacgataacctggcagtggaaggaaagaagcatggtctactttaggtgtgcgctgggtctctggtgctcttcactgttgcctgtcactttttttttccttttttgnaanattgatgacatcaatgntaacatttgaaaatattttctgaaattactgnttgtaatgggctaaaaatcanataaaacgttttgtgtcggaaaaaaaaaaaaaaaaaaaaaagggggnccgcttcccttanagnggantcgnattaanctttaaattaacttgaacttggaactcttgtttaaaaaatccagnaaggaacctncaaancnccctntggaatttnttcnaaancccttggtttgcccccgggnnttttttttttggggaaaantccaancttnnntngggnnaaattttncggganctnaggnanncttaaaatggaaaaaaaantccctggnaanaacnccccgtntaaatttcccaagnggntnnaaaaaaaatttttgaggnntttnnnncntttncnanggacnanaaanaaacgttncctggaannanncctttttaaacnnnaaaaaaaanccnntttttccnnttttttntttttccccgaaaantccccna

SEQ ID NO: 310 - DNA, 1369 bp, Homo Sapiens
  misc_feature (1)..(1): n is a, c, g, or t
  misc_feature (5)..(11): n is a, c, g, or t
  misc_feature (13)..(13): n is a, c, g, or t
  misc_feature (850)..(850): n is a, c, g, or t
  misc_feature (853)..(853): n is a, c, g, or t
  misc_feature (884)..(884): n is a, c, g, or t
  misc_feature (928)..(928): n is a, c, g, or t
  misc_feature (976)..(976): n is a, c, g, or t
  misc_feature (1001)..(1001): n is a, c, g, or t
  misc_feature (1004)..(1004): n is a, c, g, or t
  misc_feature (1006)..(1006): n is a, c, g, or t
  misc_feature (1036)..(1036): n is a, c, g, or t
  misc_feature (1058)..(1058): n is a, c, g, or t
  misc_feature (1062)..(1062): n is a, c, g, or t
  misc_feature (1066)..(1066): n is a, c, g, or t
  misc_feature (1069)..(1069): n is a, c, g, or t
  misc_feature (1074)..(1074): n is a, c, g, or t
  misc_feature (1085)..(1085): n is a, c, g, or t
  misc_feature (1099)..(1099): n is a, c, g, or t
  misc_feature (1102)..(1102): n is a, c, g, or t
  misc_feature (1105)..(1105): n is a, c, g, or t
  misc_feature (1109)..(1109): n is a, c, g, or t
  misc_feature (1120)..(1120): n is a, c, g, or t
  misc_feature (1129)..(1129): n is a, c, g, or t
  misc_feature (1133)..(1133): n is a, c, g, or t
  misc_feature (1143)..(1143): n is a, c, g, or t
  misc_feature (1153)..(1153): n is a, c, g, or t
  misc_feature (1162)..(1162): n is a, c, g, or t
  misc_feature (1164)..(1164): n is a, c, g, or t
  misc_feature (1174)..(1174): n is a, c, g, or t
  misc_feature (1176)..(1176): n is a, c, g, or t
  misc_feature (1191)..(1191): n is a, c, g, or t
  misc_feature (1194)..(1194): n is a, c, g, or t
  misc_feature (1214)..(1278): n is a, c, g, or t
  misc_feature (1283)..(1285): n is a, c, g, or t
  misc_feature (1291)..(1292): n is a, c, g, or t
  misc_feature (1297)..(1298): n is a, c, g, or t
  misc_feature (1302)..(1302): n is a, c, g, or t
  misc_feature (1308)..(1310): n is a, c, g, or t
  misc_feature (1312)..(1312): n is a, c, g, or t
  misc_feature (1315)..(1316): n is a, c, g, or t
  misc_feature (1319)..(1320): n is a, c, g, or t
  misc_feature (1327)..(1329): n is a, c, g, or t
  misc_feature (1336)..(1336): n is a, c, g, or t
  misc_feature (1338)..(1338): n is a, c, g, or t
  misc_feature (1342)..(1344): n is a, c, g, or t
  misc_feature (1350)..(1350): n is a, c, g, or t
  misc_feature (1353)..(1354): n is a, c, g, or t
  misc_feature (1357)..(1358): n is a, c, g, or t
  misc_feature (1361)..(1363): n is a, c, g, or t
  misc_feature (1369)..(1369): n is a, c, g, or t
ntccnnnnnnnantagagaaattactatgagaggatcgcatcaccatcaccatcacggatcctatttaggtgacactatagaatcgtcgacccacgcgtccgggagcccagaggaggagagcagcctcctccctggatttggtgggggccggggaccttccttccgccggaagatgggcactgaggggtcagagccaggggaggggggcccagcccctgggacagcacagcagccaagggttcacggtgttgcccttcccgggttggaaagagccaagggttggagcttcgatgggaaacgagagggcccaggcccagaccaggagggcagcacccaggcctggcagaaacggcgctcttcagacgacgcagggcctggatcctggaagcccccaccaccgccccaaagcaccaaaccaagcttcagcgccatgcgcagagcagaggccacatggcacatagctgaagagagtgcccccaaccacagctgccagagtcccagcccagcctcccaagatggggaagaggagaaggaggggaccctcttcccagagaggacacttccagctaggaatgccaagctacaggaccccgctctagctccatggcctcccaagccagtggctgtgcccaggggccgccagcctccccaggagccaggggtcagggaggaggctgaggctggagatgcagctccaggagtcaacaaaccccggctgaggctgagctcacagcaagaccaagaggagcccgaagtccaagggccccctgatccaggccggcggactgcccccctgaagcccaagaggacacggcgggcacagtcctgtgacaagctggaacctgatanaanacggcctcctgaccccacaggaacctgtganccaggaacagactgacaactgccacaacacccttcctcagcctncgaatgtgcctcgcaaggactcaaacccctatccacccccagtccccnagggcccccttgccagcccctgtcntanangggcaaaacggcaggaccaggcattggggnaacttgaggcagggactaaaanaaangganccncttgnaaaaaggaggnttcatgctgcctcnaanctntctntgaaaaacttntggtggggntttntcctccccangagggggatntttttcctntntcccaggaantntttcccttttttttnaanaaaaaaaaattttcaaaaannnnnnnnnnnnnnnnnnnnnnnnnnnnnnnnnnnnnnnnnnnnnnnnnnnnnnnnnnnnnnnnnggggnnncccccnnggggnntaantttttnnnanttnnccnntgaaacnnnaaacccnancccnnntttttnaannttnnccnnntttttn

SEQ ID NO: 311 - DNA, 1411 bp, Homo Sapiens
  misc_feature (1)..(2): n is a, c, g, or t
  misc_feature (959)..(959): n is a, c, g, or t
  misc_feature (967)..(967): n is a, c, g, or t
  misc_feature (969)..(969): n is a, c, g, or t
  misc_feature (987)..(987): n is a, c, g, or t
  misc_feature (997)..(997): n is a, c, g, or t
  misc_feature (1003)..(1003): n is a, c, g, or t
  misc_feature (1011)..(1011): n is a, c, g, or t
  misc_feature (1025)..(1025): n is a, c, g, or t
  misc_feature (1040)..(1041): n is a, c, g, or t
  misc_feature (1065)..(1065): n is a, c, g, or t
  misc_feature (1074)..(1074): n is a, c, g, or t
  misc_feature (1079)..(1079): n is a, c, g, or t
  misc_feature (1082)..(1083): n is a, c, g, or t
  misc_feature (1088)..(1088): n is a, c, g, or t
  misc_feature (1093)..(1093): n is a, c, g, or t
  misc_feature (1100)..(1100): n is a, c, g, or t
  misc_feature (1104)..(1104): n is a, c, g, or t
  misc_feature (1113)..(1113): n is a, c, g, or t
  misc_feature (1120)..(1120): n is a, c, g, or t
  misc_feature (1131)..(1131): n is a, c, g, or t
  misc_feature (1136)..(1136): n is a, c, g, or t
  misc_feature (1139)..(1139): n is a, c, g, or t
  misc_feature (1149)..(1149): n is a, c, g, or t
  misc_feature (1154)..(1155): n is a, c, g, or t
  misc_feature (1158)..(1158): n is a, c, g, or t
  misc_feature (1162)..(1162): n is a, c, g, or t
  misc_feature (1166)..(1166): n is a, c, g, or t
  misc_feature (1170)..(1170): n is a, c, g, or t
  misc_feature (1174)..(1174): n is a, c, g, or t
  misc_feature (1176)..(1176): n is a, c, g, or t
  misc_feature (1196)..(1196): n is a, c, g, or t
  misc_feature (1216)..(1216): n is a, c, g, or t
  misc_feature (1221)..(1221): n is a, c, g, or t
  misc_feature (1226)..(1226): n is a, c, g, or t
  misc_feature (1242)..(1242): n is a, c, g, or t
  misc_feature (1249)..(1250): n is a, c, g, or t
  misc_feature (1257)..(1258): n is a, c, g, or t
  misc_feature (1262)..(1262): n is a, c, g, or t
  misc_feature (1267)..(1267): n is a, c, g, or t
  misc_feature (1271)..(1271): n is a, c, g, or t
  misc_feature (1275)..(1275): n is a, c, g, or t
  misc_feature (1288)..(1288): n is a, c, g, or t
  misc_feature (1311)..(1312): n is a, c, g, or t
  misc_feature (1314)..(1314): n is a, c, g, or t
  misc_feature (1317)..(1317): n is a, c, g, or t
  misc_feature (1324)..(1325): n is a, c, g, or t
  misc_feature (1332)..(1332): n is a, c, g, or t
  misc_feature (1340)..(1341): n is a, c, g, or t
  misc_feature (1347)..(1347): n is a, c, g, or t
  misc_feature (1349)..(1349): n is a, c, g, or t
  misc_feature (1361)..(1361): n is a, c, g, or t
  misc_feature (1363)..(1364): n is a, c, g, or t
  misc_feature (1366)..(1366): n is a, c, g, or t
  misc_feature (1374)..(1374): n is a, c, g, or t
  misc_feature (1378)..(1378): n is a, c, g, or t
  misc_feature (1388)..(1388): n is a, c, g, or t
  misc_feature (1395)..(1395): n is a, c, g, or t
  misc_feature (1402)..(1402): n is a, c, g, or t
  misc_feature (1404)..(1404): n is a, c, g, or t
  misc_feature (1408)..(1409): n is a, c, g, or t
nnattagagaaattactatgagaggatcgcatcaccatcaccatcacggatcctatttaggtgacactatagaatcgtcgacccacgcgtccgaaaccacattgtttacacaggcagcccatggaggacaggcatctctaatgaaaatatccgatagcaccttgaagactgtgccagccacctcacagctctcgaagcctggaaccacaatgctgagagtagcaggaggggttatcacaactgccacttcccctgccgtggccctctcagcaaacggtcctgcacaacagtctgaaggaatggctcccgtgtcttcatctacggtcagttctgtaacgaaaacttctgggcagcagcaagtgtgtgtgagccaggccaccgtgggaacctgcaaggctgccacccccaccgtcgtcagcgccacgtccctcgtgcctacaccaaaccccatctctgggaaagccacagtatccggactgttaaagattcactccagtcagtccagtccgcagcaggccgtcctgacgattcccagccagctcaaaccactcagcgtaaacacatctggaggggtgcagacgatcctgatgcctgtgaataaagtggttcagtcattttctaccagcaagccacctgccattctgcctgtagctgccccaactccagttgtccccagctctgctccagcagctgttgcaaaagtgaagactgaaccagaaacacctggaccgagttgcctctctcaggagggtcagacagcagtgaaaacagaagaaagttctgagctgggaaactatgtcattaagatagaccatttagaaactatccagcaactcctaactgcagtagtaaagaagattccattaatcactgcaaaaagtgaagatgccagctgcttttctgcaaagtctgtggagcagtactatggctggaacattggaaaaaggagagccgctgantggcaaanancaatgacaatgcgaaaangtcttacaanaaatcntggaaaanaatccgaaatttcnccccctgactccccnnaaaacaagcaaatcgctcactggngccgctgtnatggntannccccncggancctgaancctnaagaatganggggaantcccttcgagnaagtnttnaacccaaatngaaannaancccnaagngccntttntnttttcctttggtgaaaaccntggcgaaaatggagacctgnaaaantttcnaaaaggaacccaaaanaaggagnnggggaanncccnccctnccancccnggaaaaaacccanagggcgggaaaaaaaaaaggatnngnttnctgcccnnccccggnttaatttnnggattncnaaaaaaggaatncnncncccgggcnccanaaaatttccngggaaanatttaananaaanngg

SEQ ID NO: 312 - DNA, 1379 bp, Homo Sapiens
  misc_feature (832)..(832): n is a, c, g, or t
  misc_feature (838)..(838): n is a, c, g, or t
  misc_feature (853)..(853): n is a, c, g, or t
  misc_feature (864)..(864): n is a, c, g, or t
  misc_feature (867)..(867): n is a, c, g, or t
  misc_feature (881)..(881): n is a, c, g, or t
  misc_feature (909)..(909): n is a, c, g, or t
  misc_feature (938)..(938): n is a, c, g, or t
  misc_feature (963)..(963): n is a, c, g, or t
  misc_feature (969)..(969): n is a, c, g, or t
  misc_feature (982)..(982): n is a, c, g, or t
  misc_feature (989)..(989): n is a, c, g, or t
  misc_feature (994)..(995): n is a, c, g, or t
  misc_feature (1000)..(1022): n is a, c, g, or t
  misc_feature (1031)..(1031): n is a, c, g, or t
  misc_feature (1037)..(1037): n is a, c, g, or t
  misc_feature (1040)..(1040): n is a, c, g, or t
  misc_feature (1045)..(1045): n is a, c, g, or t
  misc_feature (1050)..(1051): n is a, c, g, or t
  misc_feature (1053)..(1053): n is a, c, g, or t
  misc_feature (1060)..(1060): n is a, c, g, or t
  misc_feature (1062)..(1062): n is a, c, g, or t
  misc_feature (1073)..(1073): n is a, c, g, or t
  misc_feature (1076)..(1076): n is a, c, g, or t
  misc_feature (1078)..(1078): n is a, c, g, or t
  misc_feature (1090)..(1091): n is a, c, g, or t
  misc_feature (1101)..(1102): n is a, c, g, or t
  misc_feature (1107)..(1107): n is a, c, g, or t
  misc_feature (1112)..(1112): n is a, c, g, or t
  misc_feature (1123)..(1123): n is a, c, g, or t
  misc_feature (1126)..(1126): n is a, c, g, or t
  misc_feature (1131)..(1131): n is a, c, g, or t
  misc_feature (1134)..(1135): n is a, c, g, or t
  misc_feature (1143)..(1143): n is a, c, g, or t
  misc_feature (1148)..(1148): n is a, c, g, or t
  misc_feature (1159)..(1159): n is a, c, g, or t
  misc_feature (1166)..(1166): n is a, c, g, or t
  misc_feature (1168)..(1168): n is a, c, g, or t
  misc_feature (1177)..(1177): n is a, c, g, or t
  misc_feature (1180)..(1180): n is a, c, g, or t
  misc_feature (1182)..(1182): n is a, c, g, or t
  misc_feature (1184)..(1184): n is a, c, g, or t
  misc_feature (1187)..(1188): n is a, c, g, or t
  misc_feature (1190)..(1190): n is a, c, g, or t
  misc_feature (1193)..(1193): n is a, c, g, or t
  misc_feature (1197)..(1197): n is a, c, g, or t
  misc_feature (1205)..(1210): n is a, c, g, or t
  misc_feature (1216)..(1216): n is a, c, g, or t
  misc_feature (1218)..(1218): n is a, c, g, or t
  misc_feature (1221)..(1221): n is a, c, g, or t
  misc_feature (1225)..(1225): n is a, c, g, or t
  misc_feature (1233)..(1234): n is a, c, g, or t
  misc_feature (1236)..(1237): n is a, c, g, or t
  misc_feature (1240)..(1240): n is a, c, g, or t
  misc_feature (1244)..(1244): n is a, c, g, or t
  misc_feature (1250)..(1251): n is a, c, g, or t
  misc_feature (1258)..(1258): n is a, c, g, or t
  misc_feature (1260)..(1260): n is a, c, g, or t
  misc_feature (1263)..(1264): n is a, c, g, or t
  misc_feature (1268)..(1270): n is a, c, g, or t
  misc_feature (1272)..(1272): n is a, c, g, or t
  misc_feature (1284)..(1284): n is a, c, g, or t
  misc_feature (1288)..(1288): n is a, c, g, or t
  misc_feature (1293)..(1302): n is a, c, g, or t
  misc_feature (1304)..(1305): n is a, c, g, or t
  misc_feature (1308)..(1310): n is a, c, g, or t
  misc_feature (1315)..(1316): n is a, c, g, or t
  misc_feature (1318)..(1318): n is a, c, g, or t
  misc_feature (1320)..(1321): n is a, c, g, or t
  misc_feature (1323)..(1326): n is a, c, g, or t
  misc_feature (1329)..(1329): n is a, c, g, or t
  misc_feature (1334)..(1336): n is a, c, g, or t
  misc_feature (1339)..(1339): n is a, c, g, or t
  misc_feature (1345)..(1345): n is a, c, g, or t
  misc_feature (1347)..(1348): n is a, c, g, or t
  misc_feature (1350)..(1351): n is a, c, g, or t
  misc_feature (1360)..(1361): n is a, c, g, or t
  misc_feature (1363)..(1364): n is a, c, g, or t
  misc_feature (1372)..(1372): n is a, c, g, or t
  misc_feature (1374)..(1374): n is a, c, g, or t
  misc_feature (1379)..(1379): n is a, c, g, or t
tagagaaattactatgagaggatcgcatcaccatcaccatcacggatcctatttaggtgacactatagaatcgtcgacccacgcgtccggcgtgcagccgccgccgcagagccggagcgggggccgccggcgccgcatccctctctacctgccaacatcctgtattagagaacttgtggccggaggtgtggctgtggagagctggccggggagggacgctgctcagctgctgctctgctcctgtctcctgtcccctcccccggtcatgacagagacccgtgagccagctgagactgggggctacgccagcttggaagaagatgatgaagacctttccccaggccccgagcattcctctgattcagaatacactctctcagagccggactccgaagaggaagaagatgaggaggaggaggaagaggagaccactgacgatcctgaatatgatcctggctacaaggtgaagcagcgccttggcgggggccgtggtggcccatcccgccgggccccccgtgcagcccagcccccggcccagccttgccagctctgtggccgctcaccccttggggaggccccaccgggaaccccaccctgccggctctgctgccctgctacagccccccaggaagcaccagcccctgaaggcagggccctcggggaggaagaggaggaaccacctcgggctggggagggccgaccagctgggcgggaggaggaggaggaagaggaggaggagggaacctaccactgtacggaatgtgaggattccttcgacaacctgggggagctgcacgggcacttcatgctgcatgcccggggtgaggtgtangcagancccccatacggggancttggcaaaanggntggggtgggaaganggggctgaagaaattggggttgtgacantggtcatgggggatggggtactgccggtntttgttgtcttaaaaataaatgtgngatggncaaaaataaaaanccaaatntgttnnaaaannnnnnnnnnnnnnnnnnnnnnnaaggggggncccctnccntaaanggggnncnaattaancnttaattaactnaantnggactcctgttnnaaaaatcccnnaatgncctcnaaactcccttnggnatttnttnnaaaacctnggttncccccgggggnttttttntngggaaaaantcnancntanntnggngaantttttggnnnnnnggaacntnaantggnaaaaaaanncnnggnaatncccccnnttaaaantnccnngggnnncnaaaaaaattttngggnttttnnnnnnnnnncnnggnnnaaaannananntnnnnggnaattnnnccntttttnanncnnaaaaaaaanncnntttttttntnttttn

SEQ ID NO: 313 - DNA, 1334 bp, Homo Sapiens
  misc_feature (860)..(860): n is a, c, g, or t
  misc_feature (863)..(863): n is a, c, g, or t
  misc_feature (908)..(908): n is a, c, g, or t
  misc_feature (957)..(957): n is a, c, g, or t
  misc_feature (995)..(995): n is a, c, g, or t
  misc_feature (1005)..(1005): n is a, c, g, or t
  misc_feature (1008)..(1008): n is a, c, g, or t
  misc_feature (1020)..(1020): n is a, c, g, or t
  misc_feature (1022)..(1022): n is a, c, g, or t
  misc_feature (1033)..(1033): n is a, c, g, or t
  misc_feature (1043)..(1043): n is a, c, g, or t
  misc_feature (1046)..(1046): n is a, c, g, or t
  misc_feature (1076)..(1076): n is a, c, g, or t
  misc_feature (1084)..(1084): n is a, c, g, or t
  misc_feature (1086)..(1086): n is a, c, g, or t
  misc_feature (1091)..(1091): n is a, c, g, or t
  misc_feature (1094)..(1095): n is a, c, g, or t
  misc_feature (1098)..(1098): n is a, c, g, or t
  misc_feature (1104)..(1104): n is a, c, g, or t
  misc_feature (1107)..(1107): n is a, c, g, or t
  misc_feature (1128)..(1128): n is a, c, g, or t
  misc_feature (1132)..(1132): n is a, c, g, or t
  misc_feature (1139)..(1139): n is a, c, g, or t
  misc_feature (1141)..(1141): n is a, c, g, or t
  misc_feature (1153)..(1153): n is a, c, g, or t
  misc_feature (1155)..(1156): n is a, c, g, or t
  misc_feature (1159)..(1159): n is a, c, g, or t
  misc_feature (1164)..(1164): n is a, c, g, or t
  misc_feature (1166)..(1166): n is a, c, g, or t
  misc_feature (1178)..(1178): n is a, c, g, or t
  misc_feature (1182)..(1182): n is a, c, g, or t
  misc_feature (1186)..(1186): n is a, c, g, or t
  misc_feature (1188)..(1188): n is a, c, g, or t
  misc_feature (1192)..(1193): n is a, c, g, or t
  misc_feature (1195)..(1195): n is a, c, g, or t
  misc_feature (1198)..(1198): n is a, c, g, or t
  misc_feature (1205)..(1205): n is a, c, g, or t
  misc_feature (1214)..(1214): n is a, c, g, or t
  misc_feature (1217)..(1217): n is a, c, g, or t
  misc_feature (1219)..(1220): n is a, c, g, or t
  misc_feature (1225)..(1226): n is a, c, g, or t
  misc_feature (1231)..(1231): n is a, c, g, or t
  misc_feature (1234)..(1234): n is a, c, g, or t
  misc_feature (1237)..(1237): n is a, c, g, or t
  misc_feature (1239)..(1239): n is a, c, g, or t
  misc_feature (1243)..(1243): n is a, c, g, or t
  misc_feature (1247)..(1247): n is a, c, g, or t
  misc_feature (1253)..(1254): n is a, c, g, or t
  misc_feature (1262)..(1264): n is a, c, g, or t
  misc_feature (1271)..(1272): n is a, c, g, or t
  misc_feature (1274)..(1274): n is a, c, g, or t
  misc_feature (1288)..(1288): n is a, c, g, or t
  misc_feature (1291)..(1292): n is a, c, g, or t
  misc_feature (1295)..(1295): n is a, c, g, or t
  misc_feature (1306)..(1306): n is a, c, g, or t
  misc_feature (1309)..(1309): n is a, c, g, or t
  misc_feature (1311)..(1311): n is a, c, g, or t
  misc_feature (1313)..(1317): n is a, c, g, or t
  misc_feature (1323)..(1324): n is a, c, g, or t
  misc_feature (1326)..(1326): n is a, c, g, or t
  misc_feature (1328)..(1328): n is a, c, g, or t
atagagaaattactatgagaggatcgcatcaccatcaccatcacggatcctatttaggtgacactatagaatcgtcgacccacgcgtccggccaactctcgcactctgttcttccgccgctccgccgtcgcgtttctctgccggtcgcaatggaagaagagatcgccgcgctggtcattgacaatggctccggcatgtgcaaagctggttttgctggggacgacgctccccgagccgtgtttccttccatcgtcgggcgccccagacaccagggcgtcatggtgggcatgggccagaaggactcctacgtgggcgacgaggcccagagcaagcgtggcatcctgaccctgaagtaccccattgagcatggcatcgtcaccaactgggacgacatggagaagatctggcaccacaccttctacaacgagctgcgcgtggccccggaggagcacccagtgctgctgaccgaggcccccctgaaccccaaggccaacagagagaagatgactcagattatgtttgagaccttcaacaccccggccatgtacgtggccatccaggccgtgctgtccctctacgcctctgggcgcaccactggcattgtcatggactctggagacggggtcacccacacggtgcccatctacgagggctacgccctcccccacgccatcctgcgtctggacctggctggccgggacctgaccgactacctcatgaagatcctcactgagcgaggctacagcttcaccaccacggccgagcgggaaatcgtgcgcgacatcaaggagaagctgtgctacgtcgccctggacttcgagcaggagatggccaccgccgcatcctcctcttctctgganaanagctacgagctgcccgatggccaggtcatcaccattggcaatgancgggttccggtgtccggaaggcgctgttccagcccttccttcctgggtnatggaatcttgcggcatccacgaaaaccaccttcaaantccatcatgnaantgggaacgtggnanattccgcaaanaacttgtacnccnaacaccggtgctgtcgggggggcacccccnatgttatncnggccnttnnccnaaaggnatncaaaaagaaaatccccgcccntggngccccancnccctggaaaatnannatntttcncnccccccaaaacncaanaacncngggnngnaanggggggntccattctnggncnncctgnnccccnttncancnaatngggnttaacnngccgggannnaaaaaanntngggcccctcctttntcnncgnaaagttttttnaangnannnnnaaaagnntnantttttg

SEQ ID NO: 314 - DNA, 1410 bp, Homo Sapiens
  misc_feature (796)..(796): n is a, c, g, or t
  misc_feature (889)..(889): n is a, c, g, or t
  misc_feature (897)..(897): n is a, c, g, or t
  misc_feature (907)..(911): n is a, c, g, or t
  misc_feature (913)..(913): n is a, c, g, or t
  misc_feature (916)..(916): n is a, c, g, or t
  misc_feature (918)..(920): n is a, c, g, or t
  misc_feature (922)..(931): n is a, c, g, or t
  misc_feature (933)..(937): n is a, c, g, or t
  misc_feature (940)..(945): n is a, c, g, or t
  misc_feature (947)..(955): n is a, c, g, or t
  misc_feature (959)..(959): n is a, c, g, or t
  misc_feature (982)..(983): n is a, c, g, or t
  misc_feature (987)..(987): n is a, c, g, or t
  misc_feature (989)..(989): n is a, c, g, or t
  misc_feature (1001)..(1001): n is a, c, g, or t
  misc_feature (1006)..(1006): n is a, c, g, or t
  misc_feature (1010)..(1010): n is a, c, g, or t
  misc_feature (1012)..(1013): n is a, c, g, or t
  misc_feature (1016)..(1017): n is a, c, g, or t
  misc_feature (1027)..(1027): n is a, c, g, or t
  misc_feature (1032)..(1032): n is a, c, g, or t
  misc_feature (1035)..(1035): n is a, c, g, or t
  misc_feature (1037)..(1037): n is a, c, g, or t
  misc_feature (1042)..(1042): n is a, c, g, or t
  misc_feature (1046)..(1047): n is a, c, g, or t
  misc_feature (1050)..(1051): n is a, c, g, or t
  misc_feature (1071)..(1072): n is a, c, g, or t
  misc_feature (1084)..(1084): n is a, c, g, or t
  misc_feature (1086)..(1086): n is a, c, g, or t
  misc_feature (1098)..(1098): n is a, c, g, or t
  misc_feature (1108)..(1109): n is a, c, g, or t
  misc_feature (1112)..(1112): n is a, c, g, or t
  misc_feature (1116)..(1117): n is a, c, g, or t
  misc_feature (1125)..(1125): n is a, c, g, or t
  misc_feature (1128)..(1129): n is a, c, g, or t
  misc_feature (1133)..(1133): n is a, c, g, or t
  misc_feature (1137)..(1137): n is a, c, g, or t
  misc_feature (1140)..(1140): n is a, c, g, or t
  misc_feature (1142)..(1142): n is a, c, g, or t
  misc_feature (1153)..(1154): n is a, c, g, or t
  misc_feature (1164)..(1164): n is a, c, g, or t
  misc_feature (1170)..(1170): n is a, c, g, or t
  misc_feature (1177)..(1177): n is a, c, g, or t
  misc_feature (1179)..(1179): n is a, c, g, or t
  misc_feature (1182)..(1182): n is a, c, g, or t
  misc_feature (1201)..(1201): n is a, c, g, or t
  misc_feature (1203)..(1203): n is a, c, g, or t
  misc_feature (1205)..(1206): n is a, c, g, or t
  misc_feature (1211)..(1214): n is a, c, g, or t
  misc_feature (1216)..(1218): n is a, c, g, or t
  misc_feature (1220)..(1220): n is a, c, g, or t
  misc_feature (1223)..(1224): n is a, c, g, or t
  misc_feature (1234)..(1236): n is a, c, g, or t
  misc_feature (1238)..(1238): n is a, c, g, or t
  misc_feature (1240)..(1241): n is a, c, g, or t
  misc_feature (1245)..(1245): n is a, c, g, or t
  misc_feature (1248)..(1249): n is a, c, g, or t
  misc_feature (1259)..(1259): n is a, c, g, or t
  misc_feature (1271)..(1271): n is a, c, g, or t
  misc_feature (1280)..(1283): n is a, c, g, or t
  misc_feature (1289)..(1289): n is a, c, g, or t
  misc_feature (1301)..(1301): n is a, c, g, or t
  misc_feature (1306)..(1306): n is a, c, g, or t
  misc_feature (1308)..(1308): n is a, c, g, or t
  misc_feature (1313)..(1313): n is a, c, g, or t
  misc_feature (1316)..(1316): n is a, c, g, or t
  misc_feature (1318)..(1319): n is a, c, g, or t
  misc_feature (1325)..(1326): n is a, c, g, or t
  misc_feature (1328)..(1328): n is a, c, g, or t
  misc_feature (1330)..(1330): n is a, c, g, or t
  misc_feature (1339)..(1339): n is a, c, g, or t
  misc_feature (1347)..(1347): n is a, c, g, or t
  misc_feature (1349)..(1349): n is a, c, g, or t
  misc_feature (1352)..(1352): n is a, c, g, or t
  misc_feature (1361)..(1361): n is a, c, g, or t
  misc_feature (1365)..(1366): n is a, c, g, or t
  misc_feature (1369)..(1370): n is a, c, g, or t
  misc_feature (1376)..(1376): n is a, c, g, or t
  misc_feature (1381)..(1381): n is a, c, g, or t
  misc_feature (1384)..(1385): n is a, c, g, or t
  misc_feature (1387)..(1387): n is a, c, g, or t
  misc_feature (1389)..(1389): n is a, c, g, or t
  misc_feature (1397)..(1397): n is a, c, g, or t
  misc_feature (1399)..(1399): n is a, c, g, or t
  misc_feature (1406)..(1406): n is a, c, g, or t
  misc_feature (1410)..(1410): n is a, c, g, or t
aatagagaaattactatgagaggatcgcatcaccatcaccatcacggatcctatttaggtgacactatagaatcgtcgacgatccctacgccacctttgtcaagatgctgccagataaggactgccgctatgccctctatgatgcaacctatgagaccaaggagagcaagaaggaggatctggtgtttatcttctgggcccccgagtctgcgccccttaagagcaaaatgatttatgccagctccaaggacgccatcaagaagaagctgacagggatcaagcatgaattgcaagcaaactgctacgaggaggtcaaggaccgctgcaccctggcagagaagctggggggcagtgccgtcatctccctggagggcaagcctttgtgagccccttctggccccctgcctggagcatctggcagccccacacctgcccttgggggttgcaggctgcccccttcctgccagaccggaggggctggggggatcccagcagggggagggcaatcccttcaccccagttgccaaacagaccccccaccccctggattttccttctccctccatcccttgacggttctggccttcccaaactgcttttgatcttttgattcctcttgggctgaagcagaccaagttccccccaggcaccccagttgtgggggagcctgtattttttttaacaacatccccattccccacctggtcctcccccttcccatgctgccaacttctaaccgcaatagtgactctgtgcttgtctgtttagttctgtgtataaatggaatgttgtgganatgacccctccctgtgccggctggttcctctcccttttcccctggtcacggctactcatggaagcaggaccagttaagggaccttcgatttanaaaaaaanagaccattannnnnanaanannnannnnnnnnnnannnnnaannnnnntnnnnnnnnngggngggcccctccctaaagggagtcnnaatnancttaaattaacngaacnttgnannccnngttgaaaaantccanaangnacccnaaannccnntggattttttcaaaaccctnnttgcccccgggngnttttttttgggnaaatccaacnnacnttgnnaaattttnggnnctangaanttnantggaaaaaaannccctgggaanaccccnttaaatntnccntggccccaaaaaaattttngngnnttcannnntnnncnagnnccaaaacaannntnannggtnttnngccttttaanccaaaaaaaaanccaattttnnnntttttnatttttcccccnaaagncncccanttnannaaaaanngnanggaaaaaanttcctttncnttntaaaaaaantttnnctnnaaaaanaatcnttnntntnaaaggggngnaacctcngttn

SEQ ID NO: 315 - DNA, 1493 bp, Homo Sapiens
  misc_feature (2)..(2): n is a, c, g, or t
  misc_feature (5)..(5): n is a, c, g, or t
  misc_feature (9)..(10): n is a, c, g, or t
  misc_feature (18)..(18): n is a, c, g, or t
  misc_feature (31)..(31): n is a, c, g, or t
  misc_feature (497)..(497): n is a, c, g, or t
  misc_feature (501)..(501): n is a, c, g, or t
  misc_feature (540)..(540): n is a, c, g, or t
  misc_feature (546)..(546): n is a, c, g, or t
  misc_feature (567)..(567): n is a, c, g, or t
  misc_feature (575)..(575): n is a, c, g, or t
  misc_feature (604)..(604): n is a, c, g, or t
  misc_feature (618)..(618): n is a, c, g, or t
  misc_feature (623)..(623): n is a, c, g, or t
  misc_feature (648)..(648): n is a, c, g, or t
  misc_feature (670)..(670): n is a, c, g, or t
  misc_feature (683)..(685): n is a, c, g, or t
  misc_feature (688)..(688): n is a, c, g, or t
  misc_feature (728)..(728): n is a, c, g, or t
  misc_feature (738)..(738): n is a, c, g, or t
  misc_feature (740)..(740): n is a, c, g, or t
  misc_feature (750)..(750): n is a, c, g, or t
  misc_feature (756)..(756): n is a, c, g, or t
  misc_feature (760)..(760): n is a, c, g, or t
  misc_feature (762)..(762): n is a, c, g, or t
  misc_feature (768)..(768): n is a, c, g, or t
  misc_feature (781)..(781): n is a, c, g, or t
  misc_feature (785)..(786): n is a, c, g, or t
  misc_feature (794)..(795): n is a, c, g, or t
  misc_feature (797)..(797): n is a, c, g, or t
  misc_feature (805)..(805): n is a, c, g, or t
  misc_feature (808)..(808): n is a, c, g, or t
  misc_feature (818)..(818): n is a, c, g, or t
  misc_feature (821)..(821): n is a, c, g, or t
  misc_feature (824)..(824): n is a, c, g, or t
  misc_feature (830)..(830): n is a, c, g, or t
  misc_feature (833)..(833): n is a, c, g, or t
  misc_feature (835)..(836): n is a, c, g, or t
  misc_feature (840)..(841): n is a, c, g, or t
  misc_feature (845)..(845): n is a, c, g, or t
  misc_feature (850)..(851): n is a, c, g, or t
  misc_feature (858)..(859): n is a, c, g, or t
  misc_feature (863)..(863): n is a, c, g, or t
  misc_feature (869)..(869): n is a, c, g, or t
  misc_feature (872)..(872): n is a, c, g, or t
  misc_feature (874)..(874): n is a, c, g, or t
  misc_feature (878)..(878): n is a, c, g, or t
  misc_feature (885)..(885): n is a, c, g, or t
  misc_feature (888)..(889): n is a, c, g, or t
  misc_feature (891)..(892): n is a, c, g, or t
  misc_feature (901)..(901): n is a, c, g, or t
  misc_feature (919)..(920): n is a, c, g, or t
  misc_feature (924)..(924): n is a, c, g, or t
  misc_feature (926)..(927): n is a, c, g, or t
  misc_feature (930)..(930): n is a, c, g, or t
  misc_feature (936)..(936): n is a, c, g, or t
  misc_feature (939)..(940): n is a, c, g, or t
  misc_feature (943)..(943): n is a, c, g, or t
  misc_feature (946)..(946): n is a, c, g, or t
  misc_feature (958)..(958): n is a, c, g, or t
  misc_feature (968)..(968): n is a, c, g, or t
  misc_feature (973)..(973): n is a, c, g, or t
  misc_feature (977)..(977): n is a, c, g, or t
  misc_feature (980)..(980): n is a, c, g, or t
  misc_feature (984)..(984): n is a, c, g, or t
  misc_feature (988)..(990): n is a, c, g, or t
  misc_feature (992)..(992): n is a, c, g, or t
  misc_feature (999)..(1000): n is a, c, g, or t
  misc_feature (1009)..(1009): n is a, c, g, or t
  misc_feature (1016)..(1016): n is a, c, g, or t
  misc_feature (1034)..(1034): n is a, c, g, or t
  misc_feature (1044)..(1044): n is a, c, g, or t
  misc_feature (1050)..(1050): n is a, c, g, or t
  misc_feature (1057)..(1057): n is a, c, g, or t
  misc_feature (1062)..(1062): n is a, c, g, or t
  misc_feature (1078)..(1078): n is a, c, g, or t
  misc_feature (1088)..(1088): n is a, c, g, or t
  misc_feature (1091)..(1091): n is a, c, g, or t
  misc_feature (1108)..(1108): n is a, c, g, or t
  misc_feature (1111)..(1111): n is a, c, g, or t
  misc_feature (1120)..(1120): n is a, c, g, or t
  misc_feature (1127)..(1128): n is a, c, g, or t
  misc_feature (1134)..(1134): n is a, c, g, or t
  misc_feature (1138)..(1138): n is a, c, g, or t
  misc_feature (1147)..(1147): n is a, c, g, or t
  misc_feature (1167)..(1167): n is a, c, g, or t
  misc_feature (1171)..(1171): n is a, c, g, or t
  misc_feature (1177)..(1178): n is a, c, g, or t
  misc_feature (1187)..(1187): n is a, c, g, or t
  misc_feature (1193)..(1194): n is a, c, g, or t
  misc_feature (1199)..(1200): n is a, c, g, or t
  misc_feature (1205)..(1205): n is a, c, g, or t
  misc_feature (1207)..(1207): n is a, c, g, or t
  misc_feature (1218)..(1218): n is a, c, g, or t
  misc_feature (1222)..(1224): n is a, c, g, or t
  misc_feature (1227)..(1227): n is a, c, g, or t
  misc_feature (1230)..(1230): n is a, c, g, or t
  misc_feature (1232)..(1232): n is a, c, g, or t
  misc_feature (1236)..(1236): n is a, c, g, or t
  misc_feature (1238)..(1239): n is a, c, g, or t
  misc_feature (1252)..(1252): n is a, c, g, or t
  misc_feature (1256)..(1256): n is a, c, g, or t
  misc_feature (1258)..(1258): n is a, c, g, or t
  misc_feature (1276)..(1276): n is a, c, g, or t
  misc_feature (1294)..(1294): n is a, c, g, or t
  misc_feature (1299)..(1299): n is a, c, g, or t
  misc_feature (1302)..(1303): n is a, c, g, or t
  misc_feature (1324)..(1324): n is a, c, g, or t
  misc_feature (1328)..(1328): n is a, c, g, or t
  misc_feature (1334)..(1334): n is a, c, g, or t
  misc_feature (1337)..(1337): n is a, c, g, or t
  misc_feature (1339)..(1341): n is a, c, g, or t
  misc_feature (1347)..(1347): n is a, c, g, or t
  misc_feature (1352)..(1353): n is a, c, g, or t
  misc_feature (1357)..(1357): n is a, c, g, or t
  misc_feature (1361)..(1361): n is a, c, g, or t
  misc_feature (1365)..(1365): n is a, c, g, or t
  misc_feature (1370)..(1370): n is a, c, g, or t
  misc_feature (1383)..(1384): n is a, c, g, or t
  misc_feature (1390)..(1390): n is a, c, g, or t
  misc_feature (1394)..(1394): n is a, c, g, or t
  misc_feature (1408)..(1408): n is a, c, g, or t
  misc_feature (1417)..(1417): n is a, c, g, or t
  misc_feature (1419)..(1419): n is a, c, g, or t
  misc_feature (1422)..(1422): n is a, c, g, or t
  misc_feature (1424)..(1425): n is a, c, g, or t
  misc_feature (1442)..(1442): n is a, c, g, or t
  misc_feature (1457)..(1457): n is a, c, g, or t
  misc_feature (1460)..(1460): n is a, c, g, or t
  misc_feature (1465)..(1465): n is a, c, g, or t
  misc_feature (1467)..(1468): n is a, c, g, or t
  misc_feature (1471)..(1471): n is a, c, g, or t
  misc_feature (1473)..(1473): n is a, c, g, or t
  misc_feature (1486)..(1486): n is a, c, g, or t
tnagnggannttagttcntagaggatcgcgntcaccggtcgccactcacggatcctatttaggtgacactatagaatcgtcgacccacgcgtccggccccccaccggcagataaagagaaaatccaggccctccccaccgtccccgtcactgaggagcacgtaggctccgggctcgagtgccctgtgtgcaaggacgactacgcgctgggtgagcgtgtgcggcagctgccctgcaaccacctgttccacgacggctgcatcgtgccctggctggagcagcacgacagctgccccgtctgccgaaaaagcctcacgggacagaacacggccacgaacccccctggcctcactggggtgagcttctcctcctcgtcgtcatcgtcctcctccagctcgcccagcaacgagaacgccacaagcaactcgtgagcccacgtcggccgtcgggaaagcacggggcctttcccacccaccctcagccagcgccacacggcanccanagactgggtgccccggcggcgccacgcttggctggtcancgctgnaggtcccgcctgttccagggnaggacccnggcccggaccaccggccccctggcttggnaaggcgtgggccanatggncccctctggagcgtccccagcctcnccgtcctctgtctaacctcaancctctaaacgttnnncgntggaaagatttttataatttataaattatttactgctttnaaaataaacnanacgtttgaanttcacnttgnanggccangccatggtttgtnggcnntaaaaaanntncccaacgnctncccccaaacnttnaancacggngtntnnagcnngctnccccnngttactnntaantgcccncananaaanaggtcanatnngnncctccaaanttccaccttgtaagaatnncttnannccntattanggnngtntcngttaacttgaangtattaccanaacanattncanaaanaaannngnttccatnngaaactttnttaaagnaaaaaattatgtggtatntttggaaccntatttnaaaatanatttnttttttattaggaaangaaaaatatnaanatatattaatgggcggnccnctcccttanaaaaatnnaaattnaacncttatttanttgtaatcttggaaatccgntatnattaannccaataatnaactcnnaaacnnccttntnatattatttanaaannnttnctntnagcntnngggtgtttttttnttantntaaaaaacaactcatttntttgatatttttgagatnctatntgnnattaaaagtgagaaaaacttntggnttttantcncnnnaaattntcaannactnaaanaaantttanaattattaacttnnttatanattntttaaaaatttatnaatataaantnttntnncattataaaaaataaantttatctattattanacncttcncnnaanantacatatttattnaaaaaaa

SEQ ID NO: 316 - DNA, 1251 bp, Homo Sapiens
  misc_feature (1)..(1): n is a, c, g, or t
  misc_feature (851)..(851): n is a, c, g, or t
  misc_feature (910)..(910): n is a, c, g, or t
  misc_feature (920)..(920): n is a, c, g, or t
  misc_feature (942)..(943): n is a, c, g, or t
  misc_feature (960)..(960): n is a, c, g, or t
  misc_feature (973)..(1001): n is a, c, g, or t
  misc_feature (1014)..(1014): n is a, c, g, or t
  misc_feature (1017)..(1017): n is a, c, g, or t
  misc_feature (1034)..(1034): n is a, c, g, or t
  misc_feature (1037)..(1037): n is a, c, g, or t
  misc_feature (1044)..(1044): n is a, c, g, or t
  misc_feature (1061)..(1061): n is a, c, g, or t
  misc_feature (1089)..(1091): n is a, c, g, or t
  misc_feature (1094)..(1094): n is a, c, g, or t
  misc_feature (1102)..(1102): n is a, c, g, or t
  misc_feature (1127)..(1127): n is a, c, g, or t
  misc_feature (1144)..(1144): n is a, c, g, or t
  misc_feature (1157)..(1157): n is a, c, g, or t
  misc_feature (1165)..(1165): n is a, c, g, or t
  misc_feature (1184)..(1184): n is a, c, g, or t
  misc_feature (1186)..(1186): n is a, c, g, or t
  misc_feature (1189)..(1191): n is a, c, g, or t
  misc_feature (1199)..(1200): n is a, c, g, or t
  misc_feature (1209)..(1210): n is a, c, g, or t
  misc_feature (1215)..(1216): n is a, c, g, or t
  misc_feature (1218)..(1218): n is a, c, g, or t
  misc_feature (1220)..(1220): n is a, c, g, or t
  misc_feature (1223)..(1223): n is a, c, g, or t
  misc_feature (1225)..(1225): n is a, c, g, or t
  misc_feature (1228)..(1229): n is a, c, g, or t
  misc_feature (1233)..(1233): n is a, c, g, or t
  misc_feature (1237)..(1238): n is a, c, g, or t
  misc_feature (1246)..(1246): n is a, c, g, or t
  misc_feature (1251)..(1251): n is a, c, g, or t
naattagagaaattactatgagaggatcgcatcaccatcaccatcacggatcctatttaggtgacactatagaatcgtcgacccacgcgtccgaccccagcaggtacatctcgcctgaccagctggctgacctgtacaagtccttcatcaaggactacccagtggtgtctatcgaagatccctttgaccaggatgactggggagcttggcagaagttcacagccagtgcaggaatccaggtagtgggggatgatctcacagtgaccaacccaaagaggatcgccaaggccgtgaacgagaagtcctgcaactgcctcctgctcaaagtcaaccagattggctccgtgaccgagtctcttcaggcgtgcaagctggcccaggccaatggttggggcgtcatggtgtctcatcgttcgggggagactgaagataccttcatcgctgacctggttgtggggctgtgcactgggcagatcaagactggtgccccttgccgatctgagcgcttggccaagtacaaccagctcctcagaattgaagaggagctgggcagcaaggctaagtttgccggcaggaacttcagaaaccccttggccaagtaagctgtgggcaggcaagcccttcggtcacctgttggctacacagacccctcccctcgtgtcagctcaggcagctcgaggcccccgaccaacacttgcaggggtccctgctagttagcgccccaccgccgtggagttcgtaccgcttccttagaacttctacagaagccaagctccctggagccctgttggcagctctagctttgcagtcgtgtaattggcccaagtcattgtttttctcgcctcactttnccaccaagtgtctagagtcatgtgagcctcgtgtcatctccggggtggccacaggctanatccccgggnggttttgtgctcaaaataaaanncctcagtgacccatggngaaaaaaaaaaannnnnnnnnnnnnnnnnnnnnnnnnnnnnaaaaaggggcggnccncccccctaaaagggagnccnaattaanctttaattaacctgaancttggaactccctgttgaaaaaatcccnnnaangaccctcnaaaacccccctctggaatttttttnaaaaaccctccggtttncccccccgggggntttttttntttgggggaaaaacccaancntannntttggggnnaaatttttnnggganntnanggnanccnnaaangggnnaaaaaaantcctn

SEQ ID NO: 317 - DNA, 1403 bp, Homo Sapiens
  misc_feature (828)..(828): n is a, c, g, or t
  misc_feature (851)..(851): n is a, c, g, or t
  misc_feature (853)..(853): n is a, c, g, or t
  misc_feature (877)..(877): n is a, c, g, or t
  misc_feature (901)..(901): n is a, c, g, or t
  misc_feature (927)..(927): n is a, c, g, or t
  misc_feature (939)..(940): n is a, c, g, or t
  misc_feature (965)..(965): n is a, c, g, or t
  misc_feature (969)..(969): n is a, c, g, or t
  misc_feature (985)..(985): n is a, c, g, or t
  misc_feature (987)..(987): n is a, c, g, or t
  misc_feature (1000)..(1000): n is a, c, g, or t
  misc_feature (1010)..(1011): n is a, c, g, or t
  misc_feature (1017)..(1017): n is a, c, g, or t
  misc_feature (1021)..(1021): n is a, c, g, or t
  misc_feature (1023)..(1024): n is a, c, g, or t
  misc_feature (1032)..(1032): n is a, c, g, or t
  misc_feature (1052)..(1052): n is a, c, g, or t
  misc_feature (1067)..(1068): n is a, c, g, or t
  misc_feature (1071)..(1072): n is a, c, g, or t
  misc_feature (1082)..(1082): n is a, c, g, or t
  misc_feature (1091)..(1091): n is a, c, g, or t
  misc_feature (1096)..(1096): n is a, c, g, or t
  misc_feature (1100)..(1100): n is a, c, g, or t
  misc_feature (1103)..(1103): n is a, c, g, or t
  misc_feature (1116)..(1116): n is a, c, g, or t
  misc_feature (1121)..(1121): n is a, c, g, or t
  misc_feature (1124)..(1124): n is a, c, g, or t
  misc_feature (1133)..(1133): n is a, c, g, or t
  misc_feature (1137)..(1137): n is a, c, g, or t
  misc_feature (1153)..(1153): n is a, c, g, or t
  misc_feature (1155)..(1155): n is a, c, g, or t
  misc_feature (1159)..(1159): n is a, c, g, or t
  misc_feature (1163)..(1163): n is a, c, g, or t
  misc_feature (1177)..(1177): n is a, c, g, or t
  misc_feature (1181)..(1182): n is a, c, g, or t
  misc_feature (1186)..(1186): n is a, c, g, or t
  misc_feature (1199)..(1199): n is a, c, g, or t
  misc_feature (1218)..(1218): n is a, c, g, or t
  misc_feature (1221)..(1221): n is a, c, g, or t
  misc_feature (1244)..(1244): n is a, c, g, or t
  misc_feature (1257)..(1258): n is a, c, g, or t
  misc_feature (1267)..(1267): n is a, c, g, or t
  misc_feature (1271)..(1271): n is a, c, g, or t
  misc_feature (1273)..(1273): n is a, c, g, or t
  misc_feature (1275)..(1275): n is a, c, g, or t
  misc_feature (1279)..(1282): n is a, c, g, or t
  misc_feature (1289)..(1289): n is a, c, g, or t
  misc_feature (1299)..(1299): n is a, c, g, or t
  misc_feature (1301)..(1301): n is a, c, g, or t
  misc_feature (1303)..(1306): n is a, c, g, or t
  misc_feature (1309)..(1309): n is a, c, g, or t
  misc_feature (1313)..(1314): n is a, c, g, or t
  misc_feature (1321)..(1321): n is a, c, g, or t
  misc_feature (1323)..(1323): n is a, c, g, or t
  misc_feature (1329)..(1329): n is a, c, g, or t
  misc_feature (1332)..(1332): n is a, c, g, or t
  misc_feature (1334)..(1336): n is a, c, g, or t
  misc_feature (1338)..(1338): n is a, c, g, or t
  misc_feature (1343)..(1343): n is a, c, g, or t
  misc_feature (1347)..(1348): n is a, c, g, or t
  misc_feature (1350)..(1351): n is a, c, g, or t
  misc_feature (1355)..(1355): n is a, c, g, or t
  misc_feature (1361)..(1361): n is a, c, g, or t
  misc_feature (1371)..(1371): n is a, c, g, or t
  misc_feature (1374)..(1374): n is a, c, g, or t
  misc_feature (1384)..(1386): n is a, c, g, or t
  misc_feature (1393)..(1393): n is a, c, g, or t
  misc_feature (1395)..(1395): n is a, c, g, or t
  misc_feature (1401)..(1401): n is a, c, g, or t
gaatagagagaattactatgagaggatcgcatcaccatcaccatcacgggatcctatttaggtgacactatagaatcgtcgacccacgcgtccgcccagtctcaaagtggtgaaggaggcagtgttgactacagttatctgcaaccaggtcaagatggctatgcccaatatgctcagtattcacaggattatcagcagttttatcaacaacaagctggaggattggaatctgatgcatcatctgcatcaggcacagcagtgaccaccacctcagcggctgtagtgtcccagagtcctcagctgtataatcaaacctccaatccacctggctctccgactgaggaagcacagcctagcactagcacaagtacacaggccccagccgcttcccctactggtgtagttcctggtaccaaatatgcagtacctgacacgtccacttaccagtatgatgaatcttcaggatattactatgatccgacaacagggctctattatgaccccaactcgcaatactactataattccttgacccagcagtacctttactgggatggggaaaaagagacctacgtgccagctgcagagtctagctcccaccagcagtcgggcctgcctcctgcaaaagaggggaaagagaagaaggagaaacccaagagcaaaacagcccagcagattgccaaagacatggaacgctgggctaagagtttgaataagcagaaagaaaactttaaaaatagctttcagcctgtcaattccttgaggggaagaagaaaggagagaatctgctgcagcagacgctggcttttgctctctttgagaaagaanggagccttagctgaaaggcagcnanctcatcccagaattggtgcgaaanggaagatgaagaagaatcccctcnaaaaggggtctgggttgcctgcttanaatggtgaacannggacaaagaagaagaactggtgganaaanttgaaattgagggaananaacctaacctgantggaaaaaanngggctngttngnnctgccggncccattttccgaaaaaaaangccctaattcagggnncannaaattttcanaactttccnaagcnaaanatnggaacttttatcngccantcnaggctgaancgancagggactgggaaccntngganctangggaaaaaaaaaanaaanncccngaacccgaactgncaaaaaaaggaaaaaaaanggntttcaaaaccccaaagccaaacncaaaaaaatttgnngcccggccntgtnantnacannnncccccanaaaggtgttncncnnnnaanttgnncaaaaantncccccncangnnngnggganacanntnntggnaaaagnccggctttcnccncccttggccnnnccctatngnggtgcnaa

SEQ ID NO: 318 - DNA, 1420 bp, Homo Sapiens
  misc_feature (737)..(737): n is a, c, g, or t
  misc_feature (776)..(776): n is a, c, g, or t
  misc_feature (793)..(793): n is a, c, g, or t
  misc_feature (816)..(816): n is a, c, g, or t
  misc_feature (827)..(827): n is a, c, g, or t
  misc_feature (874)..(874): n is a, c, g, or t
  misc_feature (876)..(876): n is a, c, g, or t
  misc_feature (879)..(879): n is a, c, g, or t
  misc_feature (888)..(888): n is a, c, g, or t
  misc_feature (895)..(895): n is a, c, g, or t
  misc_feature (902)..(902): n is a, c, g, or t
  misc_feature (931)..(931): n is a, c, g, or t
  misc_feature (936)..(936): n is a, c, g, or t
  misc_feature (943)..(943): n is a, c, g, or t
  misc_feature (972)..(973): n is a, c, g, or t
  misc_feature (985)..(985): n is a, c, g, or t
  misc_feature (988)..(988): n is a, c, g, or t
  misc_feature (995)..(995): n is a, c, g, or t
  misc_feature (1003)..(1003): n is a, c, g, or t
  misc_feature (1008)..(1008): n is a, c, g, or t
  misc_feature (1012)..(1013): n is a, c, g, or t
  misc_feature (1020)..(1020): n is a, c, g, or t
  misc_feature (1034)..(1034): n is a, c, g, or t
  misc_feature (1045)..(1045): n is a, c, g, or t
  misc_feature (1054)..(1054): n is a, c, g, or t
  misc_feature (1056)..(1056): n is a, c, g, or t
  misc_feature (1059)..(1059): n is a, c, g, or t
  misc_feature (1061)..(1061): n is a, c, g, or t
  misc_feature (1070)..(1070): n is a, c, g, or t
  misc_feature (1074)..(1074): n is a, c, g, or t
  misc_feature (1077)..(1077): n is a, c, g, or t
  misc_feature (1080)..(1083): n is a, c, g, or t
  misc_feature (1085)..(1085): n is a, c, g, or t
  misc_feature (1088)..(1088): n is a, c, g, or t
  misc_feature (1094)..(1095): n is a, c, g, or t
  misc_feature (1103)..(1103): n is a, c, g, or t
  misc_feature (1105)..(1105): n is a, c, g, or t
  misc_feature (1108)..(1109): n is a, c, g, or t
  misc_feature (1111)..(1111): n is a, c, g, or t
  misc_feature (1114)..(1114): n is a, c, g, or t
  misc_feature (1117)..(1117): n is a, c, g, or t
  misc_feature (1120)..(1120): n is a, c, g, or t
  misc_feature (1127)..(1127): n is a, c, g, or t
  misc_feature (1133)..(1133): n is a, c, g, or t
  misc_feature (1137)..(1138): n is a, c, g, or t
  misc_feature (1169)..(1169): n is a, c, g, or t
  misc_feature (1171)..(1172): n is a, c, g, or t
  misc_feature (1182)..(1182): n is a, c, g, or t
  misc_feature (1185)..(1186): n is a, c, g, or t
  misc_feature (1195)..(1195): n is a, c, g, or t
  misc_feature (1203)..(1203): n is a, c, g, or t
  misc_feature (1211)..(1212): n is a, c, g, or t
  misc_feature (1218)..(1218): n is a, c, g, or t
  misc_feature (1222)..(1222): n is a, c, g, or t
  misc_feature (1231)..(1231): n is a, c, g, or t
  misc_feature (1233)..(1233): n is a, c, g, or t
  misc_feature (1248)..(1248): n is a, c, g, or t
  misc_feature (1250)..(1250): n is a, c, g, or t
  misc_feature (1256)..(1256): n is a, c, g, or t
  misc_feature (1258)..(1258): n is a, c, g, or t
  misc_feature (1261)..(1263): n is a, c, g, or t
  misc_feature (1267)..(1267): n is a, c, g, or t
  misc_feature (1278)..(1278): n is a, c, g, or t
  misc_feature (1294)..(1294): n is a, c, g, or t
  misc_feature (1298)..(1298): n is a, c, g, or t
  misc_feature (1301)..(1301): n is a, c, g, or t
  misc_feature (1312)..(1312): n is a, c, g, or t
  misc_feature (1314)..(1315): n is a, c, g, or t
  misc_feature (1329)..(1330): n is a, c, g, or t
  misc_feature (1332)..(1332): n is a, c, g, or t
  misc_feature (1336)..(1338): n is a, c, g, or t
  misc_feature (1340)..(1340): n is a, c, g, or t
  misc_feature (1360)..(1360): n is a, c, g, or t
  misc_feature (1365)..(1365): n is a, c, g, or t
  misc_feature (1378)..(1378): n is a, c, g, or t
  misc_feature (1382)..(1382): n is a, c, g, or t
  misc_feature (1384)..(1384): n is a, c, g, or t
  misc_feature (1386)..(1387): n is a, c, g, or t
  misc_feature (1393)..(1393): n is a, c, g, or t
  misc_feature (1399)..(1399): n is a, c, g, or t
  misc_feature (1404)..(1404): n is a, c, g, or t
  misc_feature (1419)..(1420): n is a, c, g, or t
aatagagagattactatgagaggatcgcatcaccatcaccatcacggatcctatttaggtgacactatagaatcgtcgacccacgcgtccggccaactctcgcactctgttcttccgccgctccgccgtcgcgtttctctgccggtcgcaatggaagaagagatcgccgcgctggtcattgacaatggctccggcatgtgcaaagctggttttgctggggacgacgctccccgagccgtgtttccttccatcgtcgggcgccccagacaccagggcgtcatggtgggcatgggccagaaggactcctacgtgggcgacgaggcccagagcaagcgtggcatcctgaccctgaagtacctcattgagcatggcatcgtcaccaactgggacgacatggagaagatctggcaccacaccttctacaacgagctgcgcgtggccccggaggagcacccagtgctgctgaccgaggcccccctgaaccccaaggccaacagagagaagatgactcagattatgtttgagaccttcaacaccccggccatgtacgtggccatccaggccgtgctgtccctctacgcctctgggcgcaccactggcattgtcatggactctggagacggggtcacccacacggtgcccatctacgagggctacgccctcccccacgccatcctgcgtctggacctggctggccgggacctgaccgactacctcatgaagatcctcactgagcnaggctacagcttcaccaccacggccgagcgggaaaatcntgcgcgacatcaaaganaagctgtgctacgtcgccctggnacttcgagcangagatggccaccgccgcatccttcttcttctctggaaaaaaagctancnaancctgccccnatggccnaggtcanaaccattggcaatgaaccggtttccgggngtccnggaggcnctgttcccagcctttccttcctggggtannggaaatctttgnggnatccacnaaaaaccnctttncaannccatcangaaaatgggaaggnggaaatccccnaaaaaactntnacncnaaaccgggngctnttnggnnnnanccncaattnnatccgggncnttnncnaanagnaancaaaagnaaatancccnncttggggccccatccccttaaaaattaaaantnncccccccccnaannccaaaaacncggggggnaagggggnntccttnttgnccccagttncnctttctccaaaaaangntttaananccnnnaatnaaaaagggggncccctcatttccaccnaaangtnttaaaaggtcntnnaaaagaaaaatttnntngtgnnnanttaaaaaaaaattttccctnaaaanacccctcttgtanaccnanannggaaanactttnaaaanatttctttttatttnn

SEQ ID NO: 319 - DNA, 1369 bp, Homo Sapiens
  misc_feature (1)..(1): n is a, c, g, or t
  misc_feature (875)..(875): n is a, c, g, or t
  misc_feature (880)..(880): n is a, c, g, or t
  misc_feature (973)..(973): n is a, c, g, or t
  misc_feature (984)..(984): n is a, c, g, or t
  misc_feature (988)..(988): n is a, c, g, or t
  misc_feature (991)..(991): n is a, c, g, or t
  misc_feature (1007)..(1007): n is a, c, g, or t
  misc_feature (1022)..(1022): n is a, c, g, or t
  misc_feature (1026)..(1026): n is a, c, g, or t
  misc_feature (1028)..(1028): n is a, c, g, or t
  misc_feature (1030)..(1030): n is a, c, g, or t
  misc_feature (1032)..(1032): n is a, c, g, or t
  misc_feature (1042)..(1042): n is a, c, g, or t
  misc_feature (1044)..(1044): n is a, c, g, or t
  misc_feature (1051)..(1051): n is a, c, g, or t
  misc_feature (1063)..(1063): n is a, c, g, or t
  misc_feature (1076)..(1076): n is a, c, g, or t
  misc_feature (1101)..(1101): n is a, c, g, or t
  misc_feature (1111)..(1111): n is a, c, g, or t
  misc_feature (1116)..(1116): n is a, c, g, or t
  misc_feature (1122)..(1122): n is a, c, g, or t
  misc_feature (1125)..(1125): n is a, c, g, or t
  misc_feature (1132)..(1133): n is a, c, g, or t
  misc_feature (1139)..(1139): n is a, c, g, or t
  misc_feature (1143)..(1143): n is a, c, g, or t
  misc_feature (1160)..(1160): n is a, c, g, or t
  misc_feature (1165)..(1165): n is a, c, g, or t
  misc_feature (1176)..(1176): n is a, c, g, or t
  misc_feature (1178)..(1178): n is a, c, g, or t
  misc_feature (1182)..(1182): n is a, c, g, or t
  misc_feature (1184)..(1184): n is a, c, g, or t
  misc_feature (1187)..(1187): n is a, c, g, or t
  misc_feature (1198)..(1198): n is a, c, g, or t
  misc_feature (1212)..(1213): n is a, c, g, or t
  misc_feature (1220)..(1221): n is a, c, g, or t
  misc_feature (1223)..(1224): n is a, c, g, or t
  misc_feature (1227)..(1227): n is a, c, g, or t
  misc_feature (1229)..(1229): n is a, c, g, or t
  misc_feature (1235)..(1237): n is a, c, g, or t
  misc_feature (1245)..(1247): n is a, c, g, or t
  misc_feature (1251)..(1252): n is a, c, g, or t
  misc_feature (1254)..(1256): n is a, c, g, or t
  misc_feature (1264)..(1264): n is a, c, g, or t
  misc_feature (1272)..(1273): n is a, c, g, or t
  misc_feature (1285)..(1287): n is a, c, g, or t
  misc_feature (1289)..(1290): n is a, c, g, or t
  misc_feature (1296)..(1297): n is a, c, g, or t
  misc_feature (1307)..(1307): n is a, c, g, or t
  misc_feature (1310)..(1310): n is a, c, g, or t
  misc_feature (1312)..(1313): n is a, c, g, or t
  misc_feature (1315)..(1318): n is a, c, g, or t
  misc_feature (1323)..(1323): n is a, c, g, or t
  misc_feature (1325)..(1326): n is a, c, g, or t
  misc_feature (1328)..(1328): n is a, c, g, or t
  misc_feature (1335)..(1335): n is a, c, g, or t
  misc_feature (1342)..(1342): n is a, c, g, or t
  misc_feature (1348)..(1348): n is a, c, g, or t
  misc_feature (1367)..(1367): n is a, c, g, or t
naaatagagaaattactatgagaggatcgcatcaccatcaccatcacggatcctatttaggtgacactatagaatcgtcgacccacgcgtccgcccacgcgtccggccaactctcgcactctgttcttccgccgctccgccgtcgcgtttctctgccggtcgcaatggaagaagagatcgccgcgctggtcattgacaatggctccggcatgtgcaaagctggttttgctggggacgacgctccccgagccgtgtttccttccatcgtcgggcgccccagacaccagggcgtcatggtgggcatgggccagaaggactcctacgtgggcgacgaggcccagagcaagcgtggcatcctgaccctgaagtaccccattgagcatggcatcgtcaccaactgggacgacatggagaagatctggcaccacaccttctacaacgagctgcgcgtggccccggaggagcacccagtgctgctgaccgaggcccccctgaaccccaaggccaacagagagaagatgactcagattatgtttgagaccttcaacaccccggccatgtacgtggccatccaggccgtgctgtccctctacgcctctgggcgcaccactggcattgtcatggactctggagacggggtcacccacacggtgcccatctacgagggctacgccctcccccacgccatcctgcgtctggacctggctggccgggacctgaccgactacctcatgaagatcctcactgagcgaggctacagcttcaccaccacggccgagcgggaaatcgtgcgcgacatcaaggagaagctgtgctacgtcgccctggacttcgagcaggagatggccaccgccgcatcctcctcttctctgganaaganctacgagctgcccgatggccaggtcatcaccattggcaatgagcggttccggtgtccggaagcgctgttccagccttccttcctgggtatggnaatcttgcggnatcnacnaaaaccacctttcaantccatcatgaaatgngaantngnanatcccccaananctgtacnccaacacggggnttgtcgggggggnaccaccatgtatccgggcattgccnaaaggatgcnaaagnaaatcnccnccttggnnccccancccntggaaaattaaaaattntcccnccccccaaaancnaaanantcngggggggaatnggggggtcccatcnnggccccnngnnccncntttccnnnaaaggggnnntaannannngggaaatnaaaaaaannggggcccccctnnntnncccccnnaaattttttnaangnnannnnaaaangnnanatttttnggggggnaaaatnaaaaaaaaatttcccccgnaa

SEQ ID NO: 320 - DNA, 1386 bp, Homo Sapiens
  misc_feature (3)..(3): n is a, c, g, or t
  misc_feature (812)..(812): n is a, c, g, or t
  misc_feature (860)..(860): n is a, c, g, or t
  misc_feature (892)..(892): n is a, c, g, or t
  misc_feature (905)..(905): n is a, c, g, or t
  misc_feature (917)..(917): n is a, c, g, or t
  misc_feature (922)..(922): n is a, c, g, or t
  misc_feature (930)..(930): n is a, c, g, or t
  misc_feature (937)..(937): n is a, c, g, or t
  misc_feature (942)..(942): n is a, c, g, or t
  misc_feature (967)..(967): n is a, c, g, or t
  misc_feature (997)..(997): n is a, c, g, or t
  misc_feature (1007)..(1007): n is a, c, g, or t
  misc_feature (1018)..(1018): n is a, c, g, or t
  misc_feature (1021)..(1021): n is a, c, g, or t
  misc_feature (1023)..(1023): n is a, c, g, or t
  misc_feature (1029)..(1031): n is a, c, g, or t
  misc_feature (1033)..(1034): n is a, c, g, or t
  misc_feature (1045)..(1045): n is a, c, g, or t
  misc_feature (1058)..(1060): n is a, c, g, or t
  misc_feature (1069)..(1069): n is a, c, g, or t
  misc_feature (1074)..(1074): n is a, c, g, or t
  misc_feature (1076)..(1076): n is a, c, g, or t
  misc_feature (1079)..(1079): n is a, c, g, or t
  misc_feature (1081)..(1081): n is a, c, g, or t
  misc_feature (1085)..(1085): n is a, c, g, or t
  misc_feature (1097)..(1097): n is a, c, g, or t
  misc_feature (1107)..(1107): n is a, c, g, or t
  misc_feature (1116)..(1116): n is a, c, g, or t
  misc_feature (1122)..(1122): n is a, c, g, or t
  misc_feature (1128)..(1128): n is a, c, g, or t
  misc_feature (1135)..(1135): n is a, c, g, or t
  misc_feature (1143)..(1143): n is a, c, g, or t
  misc_feature (1163)..(1163): n is a, c, g, or t
  misc_feature (1166)..(1166): n is a, c, g, or t
  misc_feature (1188)..(1188): n is a, c, g, or t
  misc_feature (1191)..(1191): n is a, c, g, or t
  misc_feature (1194)..(1194): n is a, c, g, or t
  misc_feature (1196)..(1196): n is a, c, g, or t
  misc_feature (1210)..(1210): n is a, c, g, or t
  misc_feature (1221)..(1221): n is a, c, g, or t
  misc_feature (1224)..(1224): n is a, c, g, or t
  misc_feature (1239)..(1240): n is a, c, g, or t
  misc_feature (1247)..(1247): n is a, c, g, or t
  misc_feature (1249)..(1249): n is a, c, g, or t
  misc_feature (1253)..(1253): n is a, c, g, or t
  misc_feature (1262)..(1263): n is a, c, g, or t
  misc_feature (1268)..(1268): n is a, c, g, or t
  misc_feature (1274)..(1274): n is a, c, g, or t
  misc_feature (1278)..(1278): n is a, c, g, or t
  misc_feature (1280)..(1280): n is a, c, g, or t
  misc_feature (1296)..(1296): n is a, c, g, or t
  misc_feature (1299)..(1300): n is a, c, g, or t
  misc_feature (1332)..(1332): n is a, c, g, or t
  misc_feature (1344)..(1344): n is a, c, g, or t
  misc_feature (1347)..(1347): n is a, c, g, or t
  misc_feature (1350)..(1350): n is a, c, g, or t
  misc_feature (1355)..(1355): n is a, c, g, or t
  misc_feature (1360)..(1360): n is a, c, g, or t
  misc_feature (1368)..(1371): n is a, c, g, or t
  misc_feature (1384)..(1385): n is a, c, g, or t
cantagagaaattactatgagaggatcgcatcaccatcaccatcacggatcctatttaggtgacactatagaatcgtcgacccacgcgtccgtggcgatgcacaacaaggcggcgccgccgcagatcccggacacccggcgggagctggcggagctcgtgaagcggaagcaggagctggcggaaacattggcaaatttggagcgacagatctatgcttttgagggaagctacctggaagacactcagatgtatggcaatattattcgtggctgggatcggtatctgaccaaccaaaaaaactccaatagcaaaaatgatcgaaggaaccggaagtttaaggaagctgagcggctcttcagtaaatcctcggttacctcagcagctgcagtaagtgcattggcaggagttcaggaccagctcattgaaaagagggagccaggaagtgggacggaaagtgacacttctccagacttccacaatcaggaaaatgagcccagccaggaggaccctgaggatctggatggatctgtgcagggagtgaaacctcagaaggctgcttcttctacttcctcagggagtcaccacagcagccataaaaagcgaaagaataaaaaccggcacagcccgtctggcatgtttgattatgactttgagattgatctgaagttaaacaaaaaaccacgagctgactattagaagacacattagtgcagaagcttccaggctgtaaagccctgcttcccttctctgacctcacaaagataaacatcccttcacctgagttcgtggccatccacctctgctctcccanacccagtgcctgtgactttgagtagtttgttctaatgtggtgacaaanaagtcatttctgtaaaaattgggtcttacttntgtcattttttantaacaaactgcnggaanatcaaaanaatgttntaatncccggcaagttgctaaactggggcnttttcccccttcttaaaaaaagaatgttcnccccccaaanctgggttggcnccnanctttcnnntnngaaaacccctncaaaaaatgttcnnngggtttttnttttntngcngnaaantaaaaacccaanttcccctttncaaaagggngccggnaaaaanccgggcnatttcccnaaaagggtttaaggtttccnggntttcccccgggggttttaaccnaanttncnttgggggttttttntaagccttttnaanccaaaattttccggnnaaaaaangnaaanccctttttnngggtngcccantttntnaaaggaaaaaatcggnttnnaaaaaaaaaaagaaaatttccttttttttttnggggggaaaaanggnttnaaaanccccnaccctttnnnngggaaaaactctnna

SEQ ID NO: 321 - DNA, 1309 bp, Homo Sapiens
  misc_feature (727)..(727): n is a, c, g, or t
  misc_feature (834)..(834): n is a, c, g, or t
  misc_feature (844)..(844): n is a, c, g, or t
  misc_feature (857)..(857): n is a, c, g, or t
  misc_feature (864)..(864): n is a, c, g, or t
  misc_feature (866)..(866): n is a, c, g, or t
  misc_feature (918)..(918): n is a, c, g, or t
  misc_feature (961)..(961): n is a, c, g, or t
  misc_feature (967)..(967): n is a, c, g, or t
  misc_feature (974)..(974): n is a, c, g, or t
  misc_feature (989)..(989): n is a, c, g, or t
  misc_feature (996)..(996): n is a, c, g, or t
  misc_feature (1015)..(1015): n is a, c, g, or t
  misc_feature (1020)..(1021): n is a, c, g, or t
  misc_feature (1028)..(1028): n is a, c, g, or t
  misc_feature (1031)..(1031): n is a, c, g, or t
  misc_feature (1041)..(1042): n is a, c, g, or t
  misc_feature (1050)..(1050): n is a, c, g, or t
  misc_feature (1060)..(1060): n is a, c, g, or t
  misc_feature (1063)..(1064): n is a, c, g, or t
  misc_feature (1067)..(1067): n is a, c, g, or t
  misc_feature (1075)..(1075): n is a, c, g, or t
  misc_feature (1082)..(1082): n is a, c, g, or t
  misc_feature (1092)..(1092): n is a, c, g, or t
  misc_feature (1107)..(1107): n is a, c, g, or t
  misc_feature (1113)..(1114): n is a, c, g, or t
  misc_feature (1117)..(1117): n is a, c, g, or t
  misc_feature (1121)..(1122): n is a, c, g, or t
  misc_feature (1130)..(1130): n is a, c, g, or t
  misc_feature (1134)..(1134): n is a, c, g, or t
  misc_feature (1138)..(1138): n is a, c, g, or t
  misc_feature (1147)..(1147): n is a, c, g, or t
  misc_feature (1157)..(1157): n is a, c, g, or t
  misc_feature (1161)..(1161): n is a, c, g, or t
  misc_feature (1167)..(1167): n is a, c, g, or t
  misc_feature (1185)..(1185): n is a, c, g, or t
  misc_feature (1195)..(1195): n is a, c, g, or t
  misc_feature (1199)..(1200): n is a, c, g, or t
  misc_feature (1204)..(1204): n is a, c, g, or t
  misc_feature (1208)..(1208): n is a, c, g, or t
  misc_feature (1222)..(1226): n is a, c, g, or t
  misc_feature (1229)..(1231): n is a, c, g, or t
  misc_feature (1234)..(1234): n is a, c, g, or t
  misc_feature (1239)..(1240): n is a, c, g, or t
  misc_feature (1242)..(1242): n is a, c, g, or t
  misc_feature (1245)..(1248): n is a, c, g, or t
  misc_feature (1265)..(1265): n is a, c, g, or t
  misc_feature (1279)..(1281): n is a, c, g, or t
  misc_feature (1283)..(1286): n is a, c, g, or t
  misc_feature (1292)..(1294): n is a, c, g, or t
  misc_feature (1298)..(1299): n is a, c, g, or t
  misc_feature (1303)..(1307): n is a, c, g, or t
  misc_feature (1309)..(1309): n is a, c, g, or t
attagagaaattactatgagaggatcgcatcaccatcaccatcacggatcctatttaggtgacactatagaatcgtcgacccacgcgtccgaagaagaggaggaagatgaggagagctcctcggagggcttggaggctgaggactgggcccagggagtagtggaggccggtggcagcttcggggcttatggtgcccaggaggaagcccagtgccctactctgcatttcctggaaggtggggaggactctgattcagacagtgaggaagaggacgatgaggaagaggatgatgaagatgaagacgacgatgatgatgaggaggatggtgatgaggtgcctgtacccagctttggggaggccatggcttactttgccatggtcaagaggtacctgacctccttccccattgatgaccgcgtgcagagccacatcctccacttggaacacgatctggttcatgtgaccaggaagaaccacgccaggcaggcgggagttcgaggtcttggacatcaaagctgagtcactggacctagctgtgcccccaacctagattggcagcaccaccccagggcagaggactctctgggcacccgctgtgcatggagccagagtgcagagccccagatcctttagtaatgcttcccctggtcctgcaacaggcccggtcacctcggccgggcccggggctgaggtcagcctcactgcctgcttattgcctctttctcanaatcctctttcctccccatttggccctgggctcaggggaccaggtggggcgggtggggagctgtccggtgctaccacaccgtgccctcagtggactaaccacagcancagccagggnatgggccctggangttcccngncggaaaagtgcctctcccctctgccatccacgtcaggtctttggtggggggnacccccaaagccattctgggaagggctccaaaaaaaggtccanccctangcccccntgcaagggtgggaanccccccncccccaccccccaggcccnccttnnaaaaacncanttttaactcnntggggggntcctgaaccntgnnttntgcctggntttcccnccttccccantcccttttctttggnccctgnnccntggnnactttggncccntggnttttttttnccaaattggnaggntttccnaaaaggcccccccccccngggaaaatanccanngggncccnttctttttgggggnnnnnttnnnggnccccnngnccnnnnccccccccctttggggnggggcccccccctnnngnnnnaaaaannncccnngggnnnnntn

SEQ ID NO: 322 - DNA, 1400 bp, Homo Sapiens
  misc_feature (818)..(818): n is a, c, g, or t
  misc_feature (841)..(841): n is a, c, g, or t
  misc_feature (849)..(849): n is a, c, g, or t
  misc_feature (861)..(861): n is a, c, g, or t
  misc_feature (877)..(877): n is a, c, g, or t
  misc_feature (879)..(879): n is a, c, g, or t
  misc_feature (893)..(893): n is a, c, g, or t
  misc_feature (904)..(904): n is a, c, g, or t
  misc_feature (910)..(910): n is a, c, g, or t
  misc_feature (916)..(916): n is a, c, g, or t
  misc_feature (928)..(928): n is a, c, g, or t
  misc_feature (949)..(949): n is a, c, g, or t
  misc_feature (964)..(964): n is a, c, g, or t
  misc_feature (975)..(975): n is a, c, g, or t
  misc_feature (981)..(981): n is a, c, g, or t
  misc_feature (1005)..(1005): n is a, c, g, or t
  misc_feature (1023)..(1024): n is a, c, g, or t
  misc_feature (1031)..(1031): n is a, c, g, or t
  misc_feature (1033)..(1033): n is a, c, g, or t
  misc_feature (1035)..(1035): n is a, c, g, or t
  misc_feature (1046)..(1046): n is a, c, g, or t
  misc_feature (1049)..(1049): n is a, c, g, or t
  misc_feature (1055)..(1055): n is a, c, g, or t
  misc_feature (1058)..(1058): n is a, c, g, or t
  misc_feature (1060)..(1061): n is a, c, g, or t
  misc_feature (1068)..(1069): n is a, c, g, or t
  misc_feature (1077)..(1077): n is a, c, g, or t
  misc_feature (1092)..(1092): n is a, c, g, or t
  misc_feature (1094)..(1095): n is a, c, g, or t
  misc_feature (1097)..(1097): n is a, c, g, or t
  misc_feature (1101)..(1103): n is a, c, g, or t
  misc_feature (1106)..(1107): n is a, c, g, or t
  misc_feature (1111)..(1112): n is a, c, g, or t
  misc_feature (1115)..(1115): n is a, c, g, or t
  misc_feature (1118)..(1119): n is a, c, g, or t
  misc_feature (1127)..(1127): n is a, c, g, or t
  misc_feature (1144)..(1144): n is a, c, g, or t
  misc_feature (1152)..(1152): n is a, c, g, or t
  misc_feature (1162)..(1162): n is a, c, g, or t
  misc_feature (1165)..(1165): n is a, c, g, or t
  misc_feature (1176)..(1176): n is a, c, g, or t
  misc_feature (1181)..(1181): n is a, c, g, or t
  misc_feature (1187)..(1187): n is a, c, g, or t
  misc_feature (1190)..(1190): n is a, c, g, or t
  misc_feature (1193)..(1193): n is a, c, g, or t
  misc_feature (1196)..(1196): n is a, c, g, or t
  misc_feature (1200)..(1200): n is a, c, g, or t
  misc_feature (1205)..(1205): n is a, c, g, or t
  misc_feature (1209)..(1209): n is a, c, g, or t
  misc_feature (1215)..(1215): n is a, c, g, or t
  misc_feature (1217)..(1217): n is a, c, g, or t
  misc_feature (1227)..(1227): n is a, c, g, or t
  misc_feature (1232)..(1232): n is a, c, g, or t
  misc_feature (1242)..(1242): n is a, c, g, or t
  misc_feature (1247)..(1247): n is a, c, g, or t
  misc_feature (1257)..(1259): n is a, c, g, or t
  misc_feature (1273)..(1273): n is a, c, g, or t
  misc_feature (1280)..(1280): n is a, c, g, or t
  misc_feature (1284)..(1284): n is a, c, g, or t
  misc_feature (1286)..(1287): n is a, c, g, or t
  misc_feature (1289)..(1289): n is a, c, g, or t
  misc_feature (1296)..(1296): n is a, c, g, or t
  misc_feature (1298)..(1298): n is a, c, g, or t
  misc_feature (1300)..(1300): n is a, c, g, or t
  misc_feature (1302)..(1303): n is a, c, g, or t
  misc_feature (1305)..(1305): n is a, c, g, or t
  misc_feature (1317)..(1320): n is a, c, g, or t
  misc_feature (1334)..(1334): n is a, c, g, or t
  misc_feature (1340)..(1341): n is a, c, g, or t
  misc_feature (1345)..(1345): n is a, c, g, or t
  misc_feature (1349)..(1349): n is a, c, g, or t
  misc_feature (1353)..(1353): n is a, c, g, or t
  misc_feature (1356)..(1356): n is a, c, g, or t
  misc_feature (1362)..(1362): n is a, c, g, or t
  misc_feature (1364)..(1364): n is a, c, g, or t
  misc_feature (1366)..(1366): n is a, c, g, or t
  misc_feature (1373)..(1374): n is a, c, g, or t
  misc_feature (1376)..(1376): n is a, c, g, or t
  misc_feature (1378)..(1378): n is a, c, g, or t
  misc_feature (1385)..(1385): n is a, c, g, or t
  misc_feature (1395)..(1395): n is a, c, g, or t
  misc_feature (1400)..(1400): n is a, c, g, or t
tagagaaattactatgagaggatcgcatcaccatcaccatcacggatcctatttaggtgacactatagaatcgtcgacccacgcgtccgaagaagaccaagacccatcatgccccaggctcagcagggagctgctggatgagaaagagcctgaagtcttgcaggactcactggatagatgttattcgactccttcaggttatcttgaactgcctgacttaggccagccctacagcagtgctgtttactcattggaggaacagtaccttggcttggctcttgacgtggacagaattaaaaaggaccaagaagaggaagaagaccaaggcccaccatgccccaggctcagcagggagctgctggaggtagtagagcctgaagtcttgcaggactcactggatagatgttattcaactccttccagttgtcttgaacagcctgactcctgccagccctatggaagttccttttatgcattggaggaaaaacatgttggcttttctcttgacgtgggagaaattgaaaagaaggggaaggggaagaaaagaaggggaagaagatcaaagaaggaaagaagaaggggaagaaaagaaggggaagaagatcaaaacccaccatgccccaggctcagcagggagctgctggatgagaaagggcctgaagtcttgcaggactcactggatagatgttattcaactccttcaggttgtcttgaactgactgactcatgccagccctacagaagtgccttttatgtattggagcaacagcgtgttggcttggctgttgacatggatgaaattgaaaagtacaaagaantggaagaagaccaagacccatcntggcccangctcagcagganctgctggatgaaaaanancctgaagtcttgcnggactcactgnatatangttatncgactccctcangttatcttgaactgcccggancttaagccaaccccnacagccagggnctgttnactccttggaagggaaaattaccnttgggcttggcttctggnnggggacngnanttaaaaagganccntaaacnggnannaacaccnntgtccccnccatgcccccaggcntnntngggnnnctnntggnnagnaannaaaacccngaaatttttgccgggancccccggnaaaaaggttnttnacccccttccnattgnctaaanaanccnacntccnccccncccntggaantncttttttctnttggnagaaaaccgnggggnttttcctttnnngggaaaatttcccncaaaaanaaantnnanccccccntntncnngnaaaaataaaaannnngggggccccccccngggggnnaaanctantccnggngggccncntnaaaaaannancnaaacccnggttttaaanggggn

SEQ ID NO: 323 - DNA, 1258 bp, Homo Sapiens
  misc_feature (925)..(925): n is a, c, g, or t
  misc_feature (986)..(986): n is a, c, g, or t
  misc_feature (989)..(989): n is a, c, g, or t
  misc_feature (992)..(992): n is a, c, g, or t
  misc_feature (996)..(996): n is a, c, g, or t
  misc_feature (1005)..(1006): n is a, c, g, or t
  misc_feature (1008)..(1008): n is a, c, g, or t
  misc_feature (1025)..(1025): n is a, c, g, or t
  misc_feature (1034)..(1034): n is a, c, g, or t
  misc_feature (1041)..(1041): n is a, c, g, or t
  misc_feature (1069)..(1069): n is a, c, g, or t
  misc_feature (1077)..(1077): n is a, c, g, or t
  misc_feature (1088)..(1088): n is a, c, g, or t
  misc_feature (1094)..(1095): n is a, c, g, or t
  misc_feature (1098)..(1098): n is a, c, g, or t
  misc_feature (1103)..(1103): n is a, c, g, or t
  misc_feature (1105)..(1105): n is a, c, g, or t
  misc_feature (1107)..(1107): n is a, c, g, or t
  misc_feature (1127)..(1127): n is a, c, g, or t
  misc_feature (1143)..(1143): n is a, c, g, or t
  misc_feature (1146)..(1146): n is a, c, g, or t
  misc_feature (1151)..(1152): n is a, c, g, or t
  misc_feature (1160)..(1160): n is a, c, g, or t
  misc_feature (1169)..(1170): n is a, c, g, or t
  misc_feature (1180)..(1180): n is a, c, g, or t
  misc_feature (1185)..(1185): n is a, c, g, or t
  misc_feature (1189)..(1189): n is a, c, g, or t
  misc_feature (1191)..(1192): n is a, c, g, or t
  misc_feature (1198)..(1198): n is a, c, g, or t
  misc_feature (1213)..(1213): n is a, c, g, or t
  misc_feature (1231)..(1231): n is a, c, g, or t
  misc_feature (1233)..(1233): n is a, c, g, or t
  misc_feature (1235)..(1235): n is a, c, g, or t
  misc_feature (1242)..(1242): n is a, c, g, or t
  misc_feature (1253)..(1253): n is a, c, g, or t
tagagaaattactatgagaggatcgcatcaccatcaccatcacggatcctatttaggtgacactatagaatcgtcgacccacgcgtccgcccacgcgtccggtgacgagtcccgcgttctctccttgaatccactcgccagcccgccgccctctgccgccgcaccctgcacacccgcccctctcctgtgccaggaacttgctactaccagcaccatgccctaccaatatccagcactgaccccggagcagaagaaggagctgtctgacatcgctcaccgcatcgtggcacctggcaagggcatcctggctgcagatgagtccactgggagcattgccaagcggctgcagtccattggcaccgagaacaccgaggagaaccggcgcttctaccgccagctgctgctgacagctgacgaccgcgtgaacccctgcattgggggtgtcatcctcttccatgagacactctaccagaaggcggatgatgggcgtcccttcccccaagttatcaaatccaagggcggtgttgtgggcatcaaggtagacaagggcgtggtccccctggcagggacaaatggcgagactaccacccaagggttggatgggctgtctgagcgctgtgcccagtacaagaaggacggagctgacttcgccaagtggcgttgtgtgctgaagattggggaacacaccccctcagccctcgccatcatggaaaatgccaatgttctggcccgttatgccagtatctgccagcagaatggcattgtgcccatcgtggagcctgagatcctccctgatggggaaccatgacttgaagcgctgccagtatgtgaccgaaaaggtgctggctgctgtctacaaggctctgagtgaccaccacatctacctggaaggcaccttgctgaagcccaacatgggtcaccccanggccatgcttgaactcaaaaatttttctcatgaagaaaattgccaatggggaacggttcanagnggntgcnccgcaaaanngncccccccgcttgtccantgggaatancctttcntgttctgggagggccaaaaattgaaggnaggaaggnggttccaattnaacctnnaantggcnantnaaaaaaagggcccccctggntgaaaacccttggggnccntgaannttttttcnttaagggcnnaaaccctggnaaggncctntnncccttnaaaggccttgggggngggaaaaaaaagaaaaancntnaaaaggntttcccaaaanaaaaa

SEQ ID NO: 324 - DNA, 1384 bp, Homo Sapiens
  misc_feature (905)..(905): n is a, c, g, or t
  misc_feature (917)..(917): n is a, c, g, or t
  misc_feature (939)..(939): n is a, c, g, or t
  misc_feature (944)..(944): n is a, c, g, or t
  misc_feature (994)..(994): n is a, c, g, or t
  misc_feature (1004)..(1004): n is a, c, g, or t
  misc_feature (1027)..(1027): n is a, c, g, or t
  misc_feature (1038)..(1038): n is a, c, g, or t
  misc_feature (1046)..(1047): n is a, c, g, or t
  misc_feature (1082)..(1082): n is a, c, g, or t
  misc_feature (1088)..(1088): n is a, c, g, or t
  misc_feature (1091)..(1091): n is a, c, g, or t
  misc_feature (1102)..(1103): n is a, c, g, or t
  misc_feature (1106)..(1106): n is a, c, g, or t
  misc_feature (1110)..(1110): n is a, c, g, or t
  misc_feature (1127)..(1127): n is a, c, g, or t
  misc_feature (1133)..(1133): n is a, c, g, or t
  misc_feature (1141)..(1141): n is a, c, g, or t
  misc_feature (1150)..(1150): n is a, c, g, or t
  misc_feature (1153)..(1153): n is a, c, g, or t
  misc_feature (1159)..(1159): n is a, c, g, or t
  misc_feature (1186)..(1186): n is a, c, g, or t
  misc_feature (1188)..(1189): n is a, c, g, or t
  misc_feature (1194)..(1194): n is a, c, g, or t
  misc_feature (1199)..(1199): n is a, c, g, or t
  misc_feature (1207)..(1207): n is a, c, g, or t
  misc_feature (1209)..(1209): n is a, c, g, or t
  misc_feature (1214)..(1215): n is a, c, g, or t
  misc_feature (1218)..(1219): n is a, c, g, or t
  misc_feature (1225)..(1225): n is a, c, g, or t
  misc_feature (1227)..(1227): n is a, c, g, or t
  misc_feature (1229)..(1229): n is a, c, g, or t
  misc_feature (1234)..(1234): n is a, c, g, or t
  misc_feature (1238)..(1239): n is a, c, g, or t
  misc_feature (1241)..(1242): n is a, c, g, or t
  misc_feature (1244)..(1244): n is a, c, g, or t
  misc_feature (1258)..(1258): n is a, c, g, or t
  misc_feature (1260)..(1260): n is a, c, g, or t
  misc_feature (1262)..(1263): n is a, c, g, or t
  misc_feature (1270)..(1270): n is a, c, g, or t
  misc_feature (1273)..(1273): n is a, c, g, or t
  misc_feature (1278)..(1278): n is a, c, g, or t
  misc_feature (1282)..(1282): n is a, c, g, or t
  misc_feature (1284)..(1285): n is a, c, g, or t
  misc_feature (1287)..(1290): n is a, c, g, or t
  misc_feature (1292)..(1294): n is a, c, g, or t
  misc_feature (1299)..(1301): n is a, c, g, or t
  misc_feature (1303)..(1303): n is a, c, g, or t
  misc_feature (1305)..(1305): n is a, c, g, or t
  misc_feature (1308)..(1309): n is a, c, g, or t
  misc_feature (1311)..(1313): n is a, c, g, or t
  misc_feature (1317)..(1317): n is a, c, g, or t
  misc_feature (1321)..(1323): n is a, c, g, or t
  misc_feature (1328)..(1329): n is a, c, g, or t
  misc_feature (1331)..(1333): n is a, c, g, or t
  misc_feature (1336)..(1337): n is a, c, g, or t
  misc_feature (1344)..(1344): n is a, c, g, or t
  misc_feature (1347)..(1350): n is a, c, g, or t
  misc_feature (1352)..(1352): n is a, c, g, or t
  misc_feature (1357)..(1360): n is a, c, g, or t
  misc_feature (1364)..(1365): n is a, c, g, or t
  misc_feature (1367)..(1373): n is a, c, g, or t
  misc_feature (1375)..(1376): n is a, c, g, or t
tagagagattactatgagaggatcgcatcaccatcaccatcacggatcctatttaggtgacactatagaatcgtcgacccacgcgtccgcagcaggccaagctgccatcccaggggagcgaggacgtctgtgcagagctgagaggcagcagccatgtgtgaacagactgggcctcatcctggccccaccgactttgtgtggacagagcctgtttccctgtctgtgcaacacagaacctgcctgatctcactgctggatccctcttcttcctgccaggaaaataaaaaggttcaaaaggaagttgctgcgtatccatctgaggcctctgaggacagcaaagagcaaaggccctgggaccgggtctacgtgcccatgacagagctctggctggactggttctgagcctctaacacccccaagactcagaaccgtgaagaaaatctttccaataaatccaagagttgctgctgctataggtcaggctgccacctttcggggcctccgtcttcagacaaacccagcctggcttcatccacactccctgtccccacagctgcaggaacagcacttcctgccaccgagccgtgtgaccacagtggattgtctctggaggggcccaagggggccctggccacccttctgactgactcggtgccaggggacagaccaacgtccctctcgtgctgacagccgggccgcaccctggcatgagggcatttacagaaatgctggcggaactgctgccagggaggctgtagggtcctctggcaaaagaggcctcaggtggctcctcagagtgtctgtggttctctgtcccaggctgttccctaagaaggtctgcccaggactcaggtaatcatatgctcattaaaaactcttgggcactgcctgtgtgcccagcccancccattatgtcngtgaaggacagatgtggagganagcantcccctgcccttggttgggggctccaggccagcaagggccacagcccccnaaaggcaaancaggaaaacaggactcggggcanggtgaaaccancccttctnnttgggcaaaagggaaaaaaaaaccccggggggggnaagggnggnccccggggtcnnccngggntaagggcaaaaaaaganaaaggncagggttnttgggtttnaantgccanggcccctcctctttttttgcccccccnanngcctnagggnccaaggtnancctgnnccnnagggangncnggggnccgnntnntnctttgggaaggggntncnngggtggnacnaaaangttntnncnnnncnnngggcnnnangnaanntnnngggngggnnnaaaanntnnntannccaaaanggnnnncnggggnnnnaaannannnnnnngnncccccccc

SEQ ID NO: 325 - DNA, 1709 bp, Homo Sapiens
  misc_feature (69)..(69): n is a, c, g, or t
  misc_feature (113)..(113): n is a, c, g, or t
  misc_feature (172)..(172): n is a, c, g, or t
  misc_feature (225)..(225): n is a, c, g, or t
  misc_feature (229)..(229): n is a, c, g, or t
  misc_feature (241)..(241): n is a, c, g, or t
  misc_feature (255)..(255): n is a, c, g, or t
  misc_feature (260)..(260): n is a, c, g, or t
  misc_feature (270)..(270): n is a, c, g, or t
  misc_feature (283)..(283): n is a, c, g, or t
  misc_feature (291)..(291): n is a, c, g, or t
  misc_feature (299)..(299): n is a, c, g, or t
  misc_feature (302)..(302): n is a, c, g, or t
  misc_feature (304)..(304): n is a, c, g, or t
  misc_feature (308)..(308): n is a, c, g, or t
  misc_feature (311)..(311): n is a, c, g, or t
  misc_feature (317)..(317): n is a, c, g, or t
  misc_feature (321)..(321): n is a, c, g, or t
  misc_feature (323)..(325): n is a, c, g, or t
  misc_feature (329)..(330): n is a, c, g, or t
  misc_feature (337)..(339): n is a, c, g, or t
  misc_feature (341)..(341): n is a, c, g, or t
  misc_feature (351)..(353): n is a, c, g, or t
  misc_feature (356)..(356): n is a, c, g, or t
  misc_feature (358)..(361): n is a, c, g, or t
  misc_feature (368)..(368): n is a, c, g, or t
  misc_feature (370)..(371): n is a, c, g, or t
  misc_feature (374)..(374): n is a, c, g, or t
  misc_feature (385)..(385): n is a, c, g, or t
  misc_feature (387)..(387): n is a, c, g, or t
  misc_feature (391)..(391): n is a, c, g, or t
  misc_feature (393)..(394): n is a, c, g, or t
  misc_feature (396)..(396): n is a, c, g, or t
  misc_feature (399)..(399): n is a, c, g, or t
  misc_feature (405)..(407): n is a, c, g, or t
  misc_feature (413)..(413): n is a, c, g, or t
  misc_feature (415)..(416): n is a, c, g, or t
  misc_feature (432)..(432): n is a, c, g, or t
  misc_feature (442)..(444): n is a, c, g, or t
  misc_feature (449)..(449): n is a, c, g, or t
  misc_feature (453)..(454): n is a, c, g, or t
  misc_feature (460)..(460): n is a, c, g, or t
  misc_feature (462)..(464): n is a, c, g, or t
  misc_feature (470)..(470): n is a, c, g, or t
  misc_feature (473)..(474): n is a, c, g, or t
  misc_feature (476)..(478): n is a, c, g, or t
  misc_feature (483)..(485): n is a, c, g, or t
  misc_feature (489)..(490): n is a, c, g, or t
  misc_feature (494)..(495): n is a, c, g, or t
  misc_feature (500)..(501): n is a, c, g, or t
  misc_feature (503)..(503): n is a, c, g, or t
  misc_feature (507)..(507): n is a, c, g, or t
  misc_feature (509)..(509): n is a, c, g, or t
  misc_feature (511)..(511): n is a, c, g, or t
  misc_feature (518)..(519): n is a, c, g, or t
  misc_feature (523)..(524): n is a, c, g, or t
  misc_feature (526)..(526): n is a, c, g, or t
  misc_feature (530)..(530): n is a, c, g, or t
  misc_feature (535)..(535): n is a, c, g, or t
  misc_feature (539)..(540): n is a, c, g, or t
  misc_feature (544)..(544): n is a, c, g, or t
  misc_feature (547)..(547): n is a, c, g, or t
  misc_feature (553)..(553): n is a, c, g, or t
  misc_feature (557)..(557): n is a, c, g, or t
  misc_feature (562)..(562): n is a, c, g, or t
  misc_feature (565)..(565): n is a, c, g, or t
  misc_feature (569)..(569): n is a, c, g, or t
  misc_feature (573)..(573): n is a, c, g, or t
  misc_feature (582)..(582): n is a, c, g, or t
  misc_feature (589)..(589): n is a, c, g, or t
  misc_feature (593)..(593): n is a, c, g, or t
  misc_feature (595)..(595): n is a, c, g, or t
  misc_feature (599)..(599): n is a, c, g, or t
  misc_feature (603)..(603): n is a, c, g, or t
  misc_feature (605)..(605): n is a, c, g, or t
  misc_feature (611)..(612): n is a, c, g, or t
  misc_feature (614)..(615): n is a, c, g, or t
  misc_feature (618)..(618): n is a, c, g, or t
  misc_feature (628)..(628): n is a, c, g, or t
  misc_feature (633)..(633): n is a, c, g, or t
  misc_feature (635)..(635): n is a, c, g, or t
  misc_feature (637)..(637): n is a, c, g, or t
  misc_feature (639)..(639): n is a, c, g, or t
  misc_feature (642)..(642): n is a, c, g, or t
  misc_feature (646)..(647): n is a, c, g, or t
  misc_feature (651)..(651): n is a, c, g, or t
  misc_feature (658)..(658): n is a, c, g, or t
  misc_feature (661)..(661): n is a, c, g, or t
  misc_feature (668)..(668): n is a, c, g, or t
  misc_feature (670)..(670): n is a, c, g, or t
  misc_feature (672)..(672): n is a, c, g, or t
  misc_feature (674)..(674): n is a, c, g, or t
  misc_feature (676)..(678): n is a, c, g, or t
  misc_feature (680)..(680): n is a, c, g, or t
  misc_feature (682)..(682): n is a, c, g, or t
  misc_feature (685)..(685): n is a, c, g, or t
  misc_feature (690)..(691): n is a, c, g, or t
  misc_feature (693)..(693): n is a, c, g, or t
  misc_feature (695)..(695): n is a, c, g, or t
  misc_feature (699)..(699): n is a, c, g, or t
  misc_feature (708)..(708): n is a, c, g, or t
  misc_feature (711)..(711): n is a, c, g, or t
  misc_feature (715)..(715): n is a, c, g, or t
  misc_feature (717)..(717): n is a, c, g, or t
  misc_feature (719)..(720): n is a, c, g, or t
  misc_feature (723)..(723): n is a, c, g, or t
  misc_feature (725)..(726): n is a, c, g, or t
  misc_feature (732)..(732): n is a, c, g, or t
  misc_feature (734)..(734): n is a, c, g, or t
  misc_feature (737)..(738): n is a, c, g, or t
  misc_feature (743)..(746): n is a, c, g, or t
  misc_feature (748)..(750): n is a, c, g, or t
  misc_feature (752)..(753): n is a, c, g, or t
  misc_feature (757)..(757): n is a, c, g, or t
  misc_feature (759)..(759): n is a, c, g, or t
  misc_feature (765)..(765): n is a, c, g, or t
  misc_feature (768)..(768): n is a, c, g, or t
  misc_feature (771)..(771): n is a, c, g, or t
  misc_feature (775)..(775): n is a, c, g, or t
  misc_feature (777)..(777): n is a, c, g, or t
  misc_feature (786)..(786): n is a, c, g, or t
  misc_feature (792)..(792): n is a, c, g, or t
  misc_feature (795)..(795): n is a, c, g, or t
  misc_feature (798)..(800): n is a, c, g, or t
  misc_feature (802)..(802): n is a, c, g, or t
  misc_feature (804)..(804): n is a, c, g, or t
  misc_feature (806)..(808): n is a, c, g, or t
  misc_feature (810)..(811): n is a, c, g, or t
  misc_feature (816)..(816): n is a, c, g, or t
  misc_feature (825)..(825): n is a, c, g, or t
  misc_feature (831)..(831): n is a, c, g, or t
  misc_feature (834)..(835): n is a, c, g, or t
  misc_feature (838)..(839): n is a, c, g, or t
  misc_feature (843)..(843): n is a, c, g, or t
  misc_feature (846)..(846): n is a, c, g, or t
  misc_feature (848)..(849): n is a, c, g, or t
  misc_feature (853)..(853): n is a, c, g, or t
  misc_feature (857)..(857): n is a, c, g, or t
  misc_feature (860)..(860): n is a, c, g, or t
  misc_feature (863)..(863): n is a, c, g, or t
  misc_feature (873)..(874): n is a, c, g, or t
  misc_feature (878)..(878): n is a, c, g, or t
  misc_feature (880)..(880): n is a, c, g, or t
  misc_feature (885)..(885): n is a, c, g, or t
  misc_feature (888)..(888): n is a, c, g, or t
  misc_feature (890)..(890): n is a, c, g, or t
  misc_feature (899)..(900): n is a, c, g, or t
  misc_feature (902)..(903): n is a, c, g, or t
  misc_feature (905)..(906): n is a, c, g, or t
  misc_feature (912)..(912): n is a, c, g, or t
  misc_feature (921)..(921): n is a, c, g, or t
  misc_feature (925)..(925): n is a, c, g, or t
  misc_feature (931)..(931): n is a, c, g, or t
  misc_feature (933)..(933): n is a, c, g, or t
  misc_feature (935)..(935): n is a, c, g, or t
  misc_feature (937)..(937): n is a, c, g, or t
  misc_feature (940)..(940): n is a, c, g, or t
  misc_feature (942)..(942): n is a, c, g, or t
  misc_feature (944)..(944): n is a, c, g, or t
  misc_feature (948)..(949): n is a, c, g, or t
  misc_feature (953)..(953): n is a, c, g, or t
  misc_feature (955)..(955): n is a, c, g, or t
  misc_feature (960)..(961): n is a, c, g, or t
  misc_feature (964)..(964): n is a, c, g, or t
  misc_feature (967)..(967): n is a, c, g, or t
  misc_feature (971)..(971): n is a, c, g, or t
  misc_feature (973)..(974): n is a, c, g, or t
  misc_feature (981)..(983): n is a, c, g, or t
  misc_feature (985)..(985): n is a, c, g, or t
  misc_feature (998)..(1000): n is a, c, g, or t
  misc_feature (1002)..(1002): n is a, c, g, or t
  misc_feature (1008)..(1008): n is a, c, g, or t
  misc_feature (1011)..(1012): n is a, c, g, or t
  misc_feature (1016)..(1016): n is a, c, g, or t
  misc_feature (1019)..(1019): n is a, c, g, or t
  misc_feature (1030)..(1030): n is a, c, g, or t
  misc_feature (1032)..(1032): n is a, c, g, or t
  misc_feature (1035)..(1035): n is a, c, g, or t
  misc_feature (1041)..(1045): n is a, c, g, or t
  misc_feature (1047)..(1047): n is a, c, g, or t
  misc_feature (1050)..(1052): n is a, c, g, or t
  misc_feature (1055)..(1056): n is a, c, g, or t
  misc_feature (1058)..(1058): n is a, c, g, or t
  misc_feature (1063)..(1063): n is a, c, g, or t
  misc_feature (1065)..(1065): n is a, c, g, or t
  misc_feature (1067)..(1067): n is a, c, g, or t
  misc_feature (1074)..(1074): n is a, c, g, or t
  misc_feature (1078)..(1078): n is a, c, g, or t
  misc_feature (1088)..(1088): n is a, c, g, or t
  misc_feature (1093)..(1094): n is a, c, g, or t
  misc_feature (1098)..(1098): n is a, c, g, or t
  misc_feature (1101)..(1101): n is a, c, g, or t
  misc_feature (1110)..(1110): n is a, c, g, or t
  misc_feature (1112)..(1112): n is a, c, g, or t
  misc_feature (1114)..(1115): n is a, c, g, or t
  misc_feature (1117)..(1118): n is a, c, g, or t
  misc_feature (1121)..(1121): n is a, c, g, or t
  misc_feature (1133)..(1134): n is a, c, g, or t
  misc_feature (1137)..(1137): n is a, c, g, or t
  misc_feature (1139)..(1142): n is a, c, g, or t
  misc_feature (1148)..(1152): n is a, c, g, or t
  misc_feature (1164)..(1164): n is a, c, g, or t
  misc_feature (1168)..(1171): n is a, c, g, or t
  misc_feature (1175)..(1175): n is a, c, g, or t
  misc_feature (1179)..(1179): n is a, c, g, or t
  misc_feature (1182)..(1182): n is a, c, g, or t
  misc_feature (1189)..(1189): n is a, c, g, or t
  misc_feature (1191)..(1192): n is a, c, g, or t
  misc_feature (1196)..(1196): n is a, c, g, or t
  misc_feature (1200)..(1200): n is a, c, g, or t
  misc_feature (1203)..(1204): n is a, c, g, or t
  misc_feature (1208)..(1208): n is a, c, g, or t
  misc_feature (1210)..(1210): n is a, c, g, or t
  misc_feature (1212)..(1212): n is a, c, g, or t
  misc_feature (1215)..(1215): n is a, c, g, or t
  misc_feature (1219)..(1219): n is a, c, g, or t
  misc_feature (1221)..(1222): n is a, c, g, or t
  misc_feature (1224)..(1224): n is a, c, g, or t
  misc_feature (1227)..(1227): n is a, c, g, or t
  misc_feature (1230)..(1230): n is a, c, g, or t
  misc_feature (1233)..(1234): n is a, c, g, or t
  misc_feature (1236)..(1236): n is a, c, g, or t
  misc_feature (1243)..(1243): n is a, c, g, or t
  misc_feature (1247)..(1247): n is a, c, g, or t
  misc_feature (1251)..(1251): n is a, c, g, or t
  misc_feature (1258)..(1258): n is a, c, g, or t
  misc_feature (1262)..(1262): n is a, c, g, or t
  misc_feature (1265)..(1265): n is a, c, g, or t
  misc_feature (1267)..(1267): n is a, c, g, or t
  misc_feature (1272)..(1274): n is a, c, g, or t
  misc_feature (1278)..(1279): n is a, c, g, or t
  misc_feature (1281)..(1281): n is a, c, g, or t
  misc_feature (1283)..(1284): n is a, c, g, or t
  misc_feature (1286)..(1286): n is a, c, g, or t
  misc_feature (1288)..(1288): n is a, c, g, or t
  misc_feature (1293)..(1293): n is a, c, g, or t
  misc_feature (1296)..(1296): n is a, c, g, or t
  misc_feature (1301)..(1301): n is a, c, g, or t
  misc_feature (1312)..(1312): n is a, c, g, or t
  misc_feature (1318)..(1318): n is a, c, g, or t
  misc_feature (1320)..(1321): n is a, c, g, or t
  misc_feature (1330)..(1330): n is a, c, g, or t
  misc_feature (1332)..(1333): n is a, c, g, or t
  misc_feature (1338)..(1338): n is a, c, g, or t
  misc_feature (1341)..(1343): n is a, c, g, or t
  misc_feature (1345)..(1345): n is a, c, g, or t
  misc_feature (1351)..(1353): n is a, c, g, or t
  misc_feature (1357)..(1358): n is a, c, g, or t
  misc_feature (1368)..(1368): n is a, c, g, or t
  misc_feature (1380)..(1380): n is a, c, g, or t
  misc_feature (1383)..(1383): n is a, c, g, or t
  misc_feature (1386)..(1386): n is a, c, g, or t
  misc_feature (1396)..(1397): n is a, c, g, or t
  misc_feature (1403)..(1404): n is a, c, g, or t
  misc_feature (1412)..(1413): n is a, c, g, or t
  misc_feature (1415)..(1416): n is a, c, g, or t
  misc_feature (1420)..(1422): n is a, c, g, or t
  misc_feature (1427)..(1428): n is a, c, g, or t
  misc_feature (1432)..(1432): n is a, c, g, or t
  misc_feature (1437)..(1437): n is a, c, g, or t
  misc_feature (1439)..(1439): n is a, c, g, or t
  misc_feature (1441)..(1441): n is a, c, g, or t
  misc_feature (1456)..(1456): n is a, c, g, or t
  misc_feature (1458)..(1459): n is a, c, g, or t
  misc_feature (1462)..(1462): n is a, c, g, or t
  misc_feature (1467)..(1467): n is a, c, g, or t
  misc_feature (1469)..(1469): n is a, c, g, or t
  misc_feature (1472)..(1474): n is a, c, g, or t
  misc_feature (1477)..(1477): n is a, c, g, or t
  misc_feature (1479)..(1479): n is a, c, g, or t
  misc_feature (1483)..(1483): n is a, c, g, or t
  misc_feature (1490)..(1490): n is a, c, g, or t
  misc_feature (1493)..(1494): n is a, c, g, or t
  misc_feature (1499)..(1499): n is a, c, g, or t
  misc_feature (1503)..(1505): n is a, c, g, or t
  misc_feature (1514)..(1515): n is a, c, g, or t
  misc_feature (1522)..(1522): n is a, c, g, or t
  misc_feature (1525)..(1525): n is a, c, g, or t
  misc_feature (1529)..(1529): n is a, c, g, or t
  misc_feature (1533)..(1533): n is a, c, g, or t
  misc_feature (1535)..(1535): n is a, c, g, or t
  misc_feature (1537)..(1539): n is a, c, g, or t
  misc_feature (1544)..(1545): n is a, c, g, or t
  misc_feature (1548)..(1549): n is a, c, g, or t
  misc_feature (1553)..(1555): n is a, c, g, or t
  misc_feature (1557)..(1557): n is a, c, g, or t
  misc_feature (1559)..(1559): n is a, c, g, or t
  misc_feature (1563)..(1563): n is a, c, g, or t
  misc_feature (1565)..(1565): n is a, c, g, or t
  misc_feature (1570)..(1571): n is a, c, g, or t
  misc_feature (1574)..(1574): n is a, c, g, or t
  misc_feature (1576)..(1576): n is a, c, g, or t
  misc_feature (1582)..(1583): n is a, c, g, or t
  misc_feature (1585)..(1585): n is a, c, g, or t
  misc_feature (1589)..(1589): n is a, c, g, or t
  misc_feature (1599)..(1599): n is a, c, g, or t
  misc_feature (1607)..(1607): n is a, c, g, or t
  misc_feature (1611)..(1613): n is a, c, g, or t
  misc_feature (1615)..(1615): n is a, c, g, or t
  misc_feature (1619)..(1619): n is a, c, g, or t
  misc_feature (1624)..(1625): n is a, c, g, or t
  misc_feature (1631)..(1631): n is a, c, g, or t
  misc_feature (1633)..(1633): n is a, c, g, or t
  misc_feature (1635)..(1635): n is a, c, g, or t
  misc_feature (1644)..(1644): n is a, c, g, or t
  misc_feature (1647)..(1647): n is a, c, g, or t
  misc_feature (1658)..(1658): n is a, c, g, or t
  misc_feature (1660)..(1660): n is a, c, g, or t
  misc_feature (1662)..(1663): n is a, c, g, or t
  misc_feature (1675)..(1675): n is a, c, g, or t
  misc_feature (1684)..(1684): n is a, c, g, or t
  misc_feature (1690)..(1690): n is a, c, g, or t
  misc_feature (1693)..(1693): n is a, c, g, or t
  misc_feature (1695)..(1695): n is a, c, g, or t
  misc_feature (1697)..(1698): n is a, c, g, or t
  misc_feature (1701)..(1701): n is a, c, g, or t
  misc_feature (1703)..(1703): n is a, c, g, or t
  misc_feature (1705)..(1705): n is a, c, g, or t
  misc_feature (1707)..(1707): n is a, c, g, or t
  misc_feature (1709)..(1709): n is a, c, g, or t
ccatatagagagaattaactatggaggaggatcgcactcaccatcaccatcacgggatcctatttaggntgacactatagaatcgtcgacccacgcgatccgcccacgcgtcnggggtcggcttcggtcgctaccgctcccgctctgccacccccgccaaccgccgctcggncctccgtcgctgccgcgtcgctttctcgctccttggatcgcacatcctcccanatgnagcgccgggacnaccccgccgcgcgnatganccggtcttcnggccgtaacggcnccatgaanccctccgntgncnaaanctnggtgantcanannncgtnnctgcagnnncngatgactcannngtncnnnnaataagntnntanagaagatcctnanaaangnngnaangagccnnntacaanannaacgaaaagaagttcnatagattgcnnnaatgncatnncacacntnnncgtacntgnnannnaaacnnncaannaagnntctannancganananctatttnngatnncntcanaaaanggannaaanccnaagtgncccnaactnagntatnctanttaatatancatcctnaccnantaanctcntnatcctnnannganaacaaaaatntgacnanantntanacanntttntccatancantatattntnancntnnncnanacntgaannanancaancacccaaanaanaatnancnnaantnnaaaaanancanntaaannnnannntnnttcntntccctnttnagnactntnatcaaaaanacaccntgngannnanantnnnanntaaanaaggaaaantaacanaanntannaaanaanannactntatnaanatnaacgcaactnngttntnaatanatntngaaaatttnnannannaacaanaaagaaganggantccaananantncgntnantaannatantncaacnnaanctncaangnntgatacnnntnaaactcatatctnnnanataaanaanntaancantataaattgtncnaantatttnnnnnantannngannanatctntntnttacgancaanttctaactancacannttantanaatacaatnananntnnttnatactatctaannaanannnncactannnnnaactccattaanaaannnngganacanaanattaccnanntccnaagnagnnttantnantanaaancnnanaanaanaannanatataantaanactnacttaancacnacnanattannncctnnantnnananaaaanctnagtcnactttaaattnaatctntnnaaaaactanannaaaanaannntnctactnnntcannatcttaccanataaatatacanatncanacaaatacanntaaacnnaaaacatnnannactnnnaaatnngccnaatcntncnataacatgacattgncnnttnatctnantcnnnccnanaaanctatcgnctnnctcanaaannnatcaataannagtcagnacnccantaancncnnnatatnnatnncaannntncntatnanatagnntcnangattannanacantaaatactanataactanattnnnancatntaaannctctcncnanaataatatntanataccgactcngnanngtttaacctcantaatataanagaatnaanantnntcncnancntn

SEQ ID NO: 326 - DNA, 1389 bp, Homo Sapiens
  misc_feature (910)..(910): n is a, c, g, or t
  misc_feature (933)..(933): n is a, c, g, or t
  misc_feature (936)..(936): n is a, c, g, or t
  misc_feature (953)..(953): n is a, c, g, or t
  misc_feature (955)..(955): n is a, c, g, or t
  misc_feature (977)..(977): n is a, c, g, or t
  misc_feature (1009)..(1009): n is a, c, g, or t
  misc_feature (1018)..(1018): n is a, c, g, or t
  misc_feature (1023)..(1023): n is a, c, g, or t
  misc_feature (1028)..(1028): n is a, c, g, or t
  misc_feature (1064)..(1064): n is a, c, g, or t
  misc_feature (1074)..(1074): n is a, c, g, or t
  misc_feature (1083)..(1083): n is a, c, g, or t
  misc_feature (1088)..(1088): n is a, c, g, or t
  misc_feature (1101)..(1101): n is a, c, g, or t
  misc_feature (1106)..(1106): n is a, c, g, or t
  misc_feature (1128)..(1128): n is a, c, g, or t
  misc_feature (1133)..(1134): n is a, c, g, or t
  misc_feature (1140)..(1140): n is a, c, g, or t
  misc_feature (1148)..(1148): n is a, c, g, or t
  misc_feature (1159)..(1159): n is a, c, g, or t
  misc_feature (1162)..(1162): n is a, c, g, or t
  misc_feature (1166)..(1166): n is a, c, g, or t
  misc_feature (1168)..(1168): n is a, c, g, or t
  misc_feature (1181)..(1181): n is a, c, g, or t
  misc_feature (1186)..(1188): n is a, c, g, or t
  misc_feature (1192)..(1192): n is a, c, g, or t
  misc_feature (1195)..(1195): n is a, c, g, or t
  misc_feature (1203)..(1203): n is a, c, g, or t
  misc_feature (1213)..(1215): n is a, c, g, or t
  misc_feature (1218)..(1219): n is a, c, g, or t
  misc_feature (1223)..(1223): n is a, c, g, or t
  misc_feature (1233)..(1234): n is a, c, g, or t
  misc_feature (1242)..(1242): n is a, c, g, or t
  misc_feature (1246)..(1246): n is a, c, g, or t
  misc_feature (1250)..(1250): n is a, c, g, or t
  misc_feature (1261)..(1261): n is a, c, g, or t
  misc_feature (1263)..(1263): n is a, c, g, or t
  misc_feature (1265)..(1265): n is a, c, g, or t
  misc_feature (1276)..(1276): n is a, c, g, or t
  misc_feature (1282)..(1309): n is a, c, g, or t
  misc_feature (1311)..(1311): n is a, c, g, or t
  misc_feature (1313)..(1313): n is a, c, g, or t
  misc_feature (1317)..(1321): n is a, c, g, or t
  misc_feature (1324)..(1324): n is a, c, g, or t
  misc_feature (1330)..(1332): n is a, c, g, or t
  misc_feature (1339)..(1345): n is a, c, g, or t
  misc_feature (1347)..(1349): n is a, c, g, or t
  misc_feature (1356)..(1356): n is a, c, g, or t
  misc_feature (1359)..(1360): n is a, c, g, or t
  misc_feature (1362)..(1363): n is a, c, g, or t
  misc_feature (1366)..(1371): n is a, c, g, or t
  misc_feature (1375)..(1377): n is a, c, g, or t
  misc_feature (1380)..(1380): n is a, c, g, or t
tagagaaattactatgagaggatcgcatcaccatcaccatcacggatcctatttaggtgacactatagaatcgtcgacccacgcgtccgcccacgcgtccgcccacgcgtccggggagctaggaggcctgcctgcctgcttgcctgccagaggccctgaggccgggccccagggctcagagctgggctgggcatttcagcaggagcccatgtgggagcggctcctctccactcttccagggggctgtgtggtgggagagctctgtcctgctcccccaagaggccagtgggcgctgcagcaagtcgcactcagggtagactcccagccaaactcctcaacaggagcgcagagaaagcagcctggggcgagtgcagtctttgccaggactcaagaggggaggatgaacatccccttctccctctcccctcctctgtcctgtgggtcccagggggcgagatgacaccacacaggtctgcctctcagggcccattcaagacctggtctttgacccattctccaagccaggactcccttcacttcctgctgcttcctcagagggcacctaagtcctctttgggagctgagcaaacaggaactgatagggacagaggacaccacttccaccagccaaggcctaggagctgctgacctggtcagccctcaccccagccaggcagagaggcaaaacctgggggtccccggcagctacgagattggaaaggttcatcagccctcccccatctgccccaggcattgtcagggaatcagtgggctcagaactggcaggcggtgcaagctctgcttccctgggccacactgagggctggggccagctccctggatgggggtggagtttaccagcagcctggggacagcatgtgtcctttttaagaaatgtccttggaagaantgttcatgtgtggcgctggtcancanctagtcccgcttccagnanactggtcaaaattaccgatgangcctgggggctcccgcttggaaacccctcagnttctccatntgccnaaaanaacggcaaagggaccaatgcatgctggctcctcatnctgccagggntgtggttangccanaacctgtactggnatcanccttatccccctttgtatttgngtggnnaagggnttcgaggnaaaaaaataanaantggncntttggcctggggnggccnnngagntgnaagacccnctcttaaacnnnaanntttnggggcccccnngggagggngggnttcntttttttaaancntnagggggggganaaaaannnnnnnnnnnnnnnnnnnnnnnnnnnnananaaannnnnggncccttnnnaaaaaannnnnnngnnnaaaaaanccnntnnaannnnnntttnnnaanaaaaaaaaa

SEQ ID NO: 327 - DNA, 1299 bp, Homo Sapiens
  misc_feature (784)..(784): n is a, c, g, or t
  misc_feature (788)..(789): n is a, c, g, or t
  misc_feature (791)..(792): n is a, c, g, or t
  misc_feature (795)..(841): n is a, c, g, or t
  misc_feature (843)..(908): n is a, c, g, or t
  misc_feature (910)..(915): n is a, c, g, or t
  misc_feature (917)..(930): n is a, c, g, or t
  misc_feature (935)..(936): n is a, c, g, or t
  misc_feature (941)..(941): n is a, c, g, or t
  misc_feature (943)..(943): n is a, c, g, or t
  misc_feature (952)..(955): n is a, c, g, or t
  misc_feature (959)..(963): n is a, c, g, or t
  misc_feature (965)..(965): n is a, c, g, or t
  misc_feature (967)..(974): n is a, c, g, or t
  misc_feature (978)..(985): n is a, c, g, or t
  misc_feature (987)..(988): n is a, c, g, or t
  misc_feature (990)..(1006): n is a, c, g, or t
  misc_feature (1011)..(1016): n is a, c, g, or t
  misc_feature (1018)..(1019): n is a, c, g, or t
  misc_feature (1031)..(1032): n is a, c, g, or t
  misc_feature (1034)..(1035): n is a, c, g, or t
  misc_feature (1039)..(1040): n is a, c, g, or t
  misc_feature (1042)..(1043): n is a, c, g, or t
  misc_feature (1046)..(1048): n is a, c, g, or t
  misc_feature (1058)..(1061): n is a, c, g, or t
  misc_feature (1067)..(1067): n is a, c, g, or t
  misc_feature (1071)..(1074): n is a, c, g, or t
  misc_feature (1078)..(1079): n is a, c, g, or t
  misc_feature (1082)..(1083): n is a, c, g, or t
  misc_feature (1088)..(1101): n is a, c, g, or t
  misc_feature (1104)..(1108): n is a, c, g, or t
  misc_feature (1117)..(1118): n is a, c, g, or t
  misc_feature (1120)..(1120): n is a, c, g, or t
  misc_feature (1122)..(1123): n is a, c, g, or t
  misc_feature (1126)..(1127): n is a, c, g, or t
  misc_feature (1131)..(1131): n is a, c, g, or t
  misc_feature (1133)..(1133): n is a, c, g, or t
  misc_feature (1137)..(1139): n is a, c, g, or t
  misc_feature (1141)..(1141): n is a, c, g, or t
  misc_feature (1144)..(1144): n is a, c, g, or t
  misc_feature (1146)..(1146): n is a, c, g, or t
  misc_feature (1148)..(1153): n is a, c, g, or t
  misc_feature (1164)..(1164): n is a, c, g, or t
  misc_feature (1166)..(1169): n is a, c, g, or t
  misc_feature (1172)..(1177): n is a, c, g, or t
  misc_feature (1179)..(1188): n is a, c, g, or t
  misc_feature (1198)..(1206): n is a, c, g, or t
  misc_feature (1211)..(1216): n is a, c, g, or t
  misc_feature (1222)..(1227): n is a, c, g, or t
  misc_feature (1236)..(1240): n is a, c, g, or t
  misc_feature (1246)..(1249): n is a, c, g, or t
  misc_feature (1255)..(1256): n is a, c, g, or t
  misc_feature (1261)..(1262): n is a, c, g, or t
  misc_feature (1265)..(1266): n is a, c, g, or t
  misc_feature (1269)..(1278): n is a, c, g, or t
  misc_feature (1285)..(1290): n is a, c, g, or t
  misc_feature (1292)..(1292): n is a, c, g, or t
  misc_feature (1294)..(1299): n is a, c, g, or t
tagagaaattaactatgagaggatcgcatcaccatcaccatcacggatcctatttaggtgacactatagaatcgtcgacccacgcgtccggggagcccagctgcccaccctctggacattcacccagccaggtggtctcgtcacctcagaggctccgccagactcctgcccaggccaggactgaggcaagcctcaaggcacttctaggacctgcctcttctcaccaagatgaactcactggtttcttggcagctactgcttttcctctgtgccacccactttggggagccattagaaaaggtggcctctgtggggaattctagacccacaggccagcagctagaatccctgggcctcctggcccccggggagcagagcctgccgtgcaccgagaggaagccagctgctactgccaggctgagccgtcgggggacctcgctgtccccgccccccgagagctccgggagcccccagcagccgggcctgtccgccccccacagccgccagatccccgcaccccagggcgcggtgctggtgcagcgggagaaggacctgccgaactacaactggaactccttcggcctgcgcttcggcaagcgggaggcggcaccagggaaccacggcagaagcgctgggcggggctgagggcgcaggtgcggggcagtgaacttcagaccccaaaggagtcagagcatgcggggcgggggcggggggcggggacgtagggctaagggagggggcgctggagcttccaacccgaggcaataaaagaaatgttgcgtanctcnnannaannnnnnnnnnnnnnnnnnnnnnnnnnnnnnnnnnnnnnnnnnnnnnnannnnnnnnnnnnnnnnnnnnnnnnnnnnnnnnnnnnnnnnnnnnnnnnnnnnnnnnnnnnnnnnnnannnnnnannnnnnnnnnnnnnggggnnccccncnttaaagggnnnnaatnnnnntnannnnnnnnttgnnnnnnnntnnannnnnnnnnnnnnnnnnaaaannnnnngnntttttaaaaaanntnntttnncnnggnnntttttttttnnnnaaaaanaaannnnttgnnaannttttnnnnnnnnnnnnnntannnnnaaaaaaaanntngnnatnncccntnttannntnccnantnnnnnnaaaaaaatttngnnnnttnnnnnntnnnnnnnnnnaaaaaaaaannnnnnnnnaatannnnnnttttannnnnnaaaaaaaannnnntttttnnnntttttnnttttnnccnngannnnnnnnnnattttannnnnnanannnnnn

SEQ ID NO: 328 - DNA, 1332 bp, Homo Sapiens
  misc_feature (884)..(884): n is a, c, g, or t
  misc_feature (952)..(952): n is a, c, g, or t
  misc_feature (955)..(955): n is a, c, g, or t
  misc_feature (972)..(972): n is a, c, g, or t
  misc_feature (976)..(976): n is a, c, g, or t
  misc_feature (998)..(998): n is a, c, g, or t
  misc_feature (1000)..(1000): n is a, c, g, or t
  misc_feature (1025)..(1025): n is a, c, g, or t
  misc_feature (1030)..(1030): n is a, c, g, or t
  misc_feature (1034)..(1034): n is a, c, g, or t
  misc_feature (1048)..(1049): n is a, c, g, or t
  misc_feature (1058)..(1058): n is a, c, g, or t
  misc_feature (1070)..(1070): n is a, c, g, or t
  misc_feature (1080)..(1080): n is a, c, g, or t
  misc_feature (1091)..(1091): n is a, c, g, or t
  misc_feature (1094)..(1095): n is a, c, g, or t
  misc_feature (1106)..(1106): n is a, c, g, or t
  misc_feature (1112)..(1112): n is a, c, g, or t
  misc_feature (1114)..(1114): n is a, c, g, or t
  misc_feature (1117)..(1117): n is a, c, g, or t
  misc_feature (1120)..(1120): n is a, c, g, or t
  misc_feature (1125)..(1125): n is a, c, g, or t
  misc_feature (1127)..(1127): n is a, c, g, or t
  misc_feature (1142)..(1142): n is a, c, g, or t
  misc_feature (1146)..(1146): n is a, c, g, or t
  misc_feature (1151)..(1151): n is a, c, g, or t
  misc_feature (1166)..(1166): n is a, c, g, or t
  misc_feature (1183)..(1184): n is a, c, g, or t
  misc_feature (1187)..(1187): n is a, c, g, or t
  misc_feature (1196)..(1196): n is a, c, g, or t
  misc_feature (1204)..(1205): n is a, c, g, or t
  misc_feature (1211)..(1211): n is a, c, g, or t
  misc_feature (1220)..(1220): n is a, c, g, or t
  misc_feature (1227)..(1228): n is a, c, g, or t
  misc_feature (1233)..(1233): n is a, c, g, or t
  misc_feature (1240)..(1240): n is a, c, g, or t
  misc_feature (1245)..(1245): n is a, c, g, or t
  misc_feature (1274)..(1274): n is a, c, g, or t
  misc_feature (1279)..(1279): n is a, c, g, or t
  misc_feature (1286)..(1286): n is a, c, g, or t
  misc_feature (1288)..(1289): n is a, c, g, or t
  misc_feature (1296)..(1296): n is a, c, g, or t
  misc_feature (1302)..(1302): n is a, c, g, or t
  misc_feature (1306)..(1306): n is a, c, g, or t
  misc_feature (1308)..(1308): n is a, c, g, or t
  misc_feature (1318)..(1319): n is a, c, g, or t
  misc_feature (1322)..(1322): n is a, c, g, or t
  misc_feature (1326)..(1326): n is a, c, g, or t
  misc_feature (1330)..(1330): n is a, c, g, or t
  misc_feature (1332)..(1332): n is a, c, g, or t
aatagagaaattactatgagaggatcgcatcaccatcaccatcacggatcctatttaggtgacactatagaatcgtcgacccacgcgtccggtagttttctctgcgcgtgtgcgttttccctcctcccccgccctcagggtccacggccaccatggcgtattaggggcagcagtgcctgcggcagcattggcctttgcagcggcggcagcagcaccaggctctgcagcggcaacccccagcggcttaagccatggcgcttctcacggcattcagcagcagcgttgctgtaaccgacaaagacaccttcgaattaagcacattcctcgattccagcaaagcaccgcaacatgaccgaaatgagcttcctgagcagcgaggtgttggtgggggacttgatgtcccccttcgacccgtcgggtttgggggctgaagaaagcctaggtctcttagatgattacctggaggtggccaagcacttcaaacctcatgggttctccagcgacaaggctaaggcgggctcctccgaatggctggctgtggatgggttggtcagtccctccaacaacagcaaggaggatgccttctccgggacagattggatgttggagaaaatggatttgaaggagttcgacttggatgccctgttgggtatagatgacctggaaaccatgccagatgaccttctgaccacgttggatgacacttgtgatctctttgcccccctagtccaggagactaataagcagcccccccagacggtgaacccaattggccatctcccagaaagtttaacaaaacccgaccaggttgcccccttcaccttcttacaacctcttcccctttccccaggggtcctgtcctccactccagatcattcctttantttaaagctgggcagtgaagtggatatcactgaaggaaataggaagccagactaccctgcttacgttngcnatgatccctcagtgcanaaangaagaaaaaacccccttcaaanangaaagtggcatctgtatgaacccanaatcntatntggggtctcctcannaagcccctntaaaaggggttnccaaaaagancccccatcccnagnnttctttggggnctgccntnccnaancttanancctctggaaaaaaanggtnccccnaaataaaggggaaantggaaaaaactaaaaannggncaaaaaaancccccctnntccccnaaaaaaggngaaaaannctttntgggggnaaaantgaaaaaaaaaagcctaaaaaggggatcncgccngaaaccncnnaaaattnaaaaancccngnggggaaaaannccntttnaaangn

SEQ ID NO: 329 - DNA, 1415 bp, Homo Sapiens
  misc_feature (845)..(845): n is a, c, g, or t
  misc_feature (936)..(936): n is a, c, g, or t
  misc_feature (954)..(954): n is a, c, g, or t
  misc_feature (971)..(971): n is a, c, g, or t
  misc_feature (993)..(993): n is a, c, g, or t
  misc_feature (996)..(996): n is a, c, g, or t
  misc_feature (1001)..(1001): n is a, c, g, or t
  misc_feature (1010)..(1010): n is a, c, g, or t
  misc_feature (1016)..(1016): n is a, c, g, or t
  misc_feature (1022)..(1022): n is a, c, g, or t
  misc_feature (1024)..(1024): n is a, c, g, or t
  misc_feature (1029)..(1029): n is a, c, g, or t
  misc_feature (1031)..(1031): n is a, c, g, or t
  misc_feature (1036)..(1036): n is a, c, g, or t
  misc_feature (1048)..(1048): n is a, c, g, or t
  misc_feature (1063)..(1063): n is a, c, g, or t
  misc_feature (1067)..(1067): n is a, c, g, or t
  misc_feature (1071)..(1071): n is a, c, g, or t
  misc_feature (1079)..(1079): n is a, c, g, or t
  misc_feature (1095)..(1095): n is a, c, g, or t
  misc_feature (1098)..(1098): n is a, c, g, or t
  misc_feature (1123)..(1123): n is a, c, g, or t
  misc_feature (1136)..(1136): n is a, c, g, or t
  misc_feature (1145)..(1145): n is a, c, g, or t
  misc_feature (1152)..(1152): n is a, c, g, or t
  misc_feature (1159)..(1159): n is a, c, g, or t
  misc_feature (1164)..(1164): n is a, c, g, or t
  misc_feature (1170)..(1170): n is a, c, g, or t
  misc_feature (1206)..(1206): n is a, c, g, or t
  misc_feature (1219)..(1219): n is a, c, g, or t
  misc_feature (1223)..(1223): n is a, c, g, or t
  misc_feature (1226)..(1226): n is a, c, g, or t
  misc_feature (1228)..(1228): n is a, c, g, or t
  misc_feature (1244)..(1244): n is a, c, g, or t
  misc_feature (1248)..(1248): n is a, c, g, or t
  misc_feature (1255)..(1255): n is a, c, g, or t
  misc_feature (1257)..(1257): n is a, c, g, or t
  misc_feature (1261)..(1261): n is a, c, g, or t
  misc_feature (1266)..(1267): n is a, c, g, or t
  misc_feature (1272)..(1272): n is a, c, g, or t
  misc_feature (1275)..(1275): n is a, c, g, or t
  misc_feature (1277)..(1277): n is a, c, g, or t
  misc_feature (1281)..(1281): n is a, c, g, or t
  misc_feature (1305)..(1305): n is a, c, g, or t
  misc_feature (1309)..(1309): n is a, c, g, or t
  misc_feature (1314)..(1315): n is a, c, g, or t
  misc_feature (1319)..(1320): n is a, c, g, or t
  misc_feature (1329)..(1329): n is a, c, g, or t
  misc_feature (1351)..(1352): n is a, c, g, or t
  misc_feature (1359)..(1361): n is a, c, g, or t
  misc_feature (1363)..(1363): n is a, c, g, or t
  misc_feature (1365)..(1366): n is a, c, g, or t
  misc_feature (1369)..(1370): n is a, c, g, or t
  misc_feature (1372)..(1372): n is a, c, g, or t
  misc_feature (1374)..(1375): n is a, c, g, or t
  misc_feature (1381)..(1381): n is a, c, g, or t
  misc_feature (1387)..(1388): n is a, c, g, or t
  misc_feature (1393)..(1393): n is a, c, g, or t
  misc_feature (1396)..(1399): n is a, c, g, or t
  misc_feature (1401)..(1401): n is a, c, g, or t
tagagaaattactatgagaggatcgcatcaccatcaccatcacggatcctatttaggtgacactatagaatcgtcgacccacgcgtccggaggaatccgcccccacgacgtccccagagtctgtgtcaggctctgttccctcttcaggtagcagcgggcgagaggaagacgcggcctccacgctagtgacgggctctgagtatgagacgatgctgacggagatcatgtccatgggctatgagcgagagcgggtcgtggccgccctgagagccagctacaacaacccccaccgagccgtggagtatctgctcacgggaattcctgggagccccgagccggaacacggttctgtccaggagagccaggtatcggagcagccggccacggaagcagcaggagagaaccccctggagttcctgcgggaccagccccagttccagaacatgcggcaggtgattcagcagaaccctgcgctgctgcccgccctgctccagcagctgggccaggagaaccctcagcttttacagcaaatcagccggcaccaggagcagttcatccagatgctgaacgagccccctggggagctggcggacatctcagatgtggagggggaggtgggcgccataggagaggaggccccgcagatgaactacatccaggtgacgccgcaggagaaagaagctatagagaggttgaaggccctgggcttcccagagagcctggtcatccaggcctatttcgcgtgtgaaaaaaatgagaacttggctgccaacttcctcctgagtcagaactttgatgacgagtgatgccaggaagccaggccaccgaagcccccaccctacccnttattccatgaaagttttataaaagaaaaatatatatatattcatgtttatttaagaaatggaaaaaaaaatcaaaatcttaaaaaaacangcaaacagtccagctttntgtcctcctaaagtggncccctgtttccatctcccgggncanaaagntgtcccccngttctnctcccnanccaancntgttnaaaaaaactggnaggattggaaggcanaaantggncccttttnggcctttttccaattnttngaaccaaaaggaaagggggtgtttntctttccttctcnaaaaaaccntgaaaanccccccntcccnttttanaaaagggaagtgggcccccattttttttccttgganggccaaatttttntttnggnanttctgaaaggcaaggncccncccattngnttgntcccnnggaanggntnattnttttttgggccccccccaaaaaanggtnttaanntttnngaaaatttnaaaaaaaaaaaaaggggccccnngggaaannntnannggnncngnnaaaaanccaacnnttttnaannnngntttttaaaaaaaaa

SEQ ID NO: 330 - DNA, 1367 bp, Homo Sapiens
  misc_feature (863)..(863): n is a, c, g, or t
  misc_feature (907)..(907): n is a, c, g, or t
  misc_feature (944)..(944): n is a, c, g, or t
  misc_feature (972)..(972): n is a, c, g, or t
  misc_feature (988)..(988): n is a, c, g, or t
  misc_feature (990)..(990): n is a, c, g, or t
  misc_feature (995)..(995): n is a, c, g, or t
  misc_feature (1001)..(1001): n is a, c, g, or t
  misc_feature (1005)..(1005): n is a, c, g, or t
  misc_feature (1008)..(1008): n is a, c, g, or t
  misc_feature (1012)..(1012): n is a, c, g, or t
  misc_feature (1020)..(1020): n is a, c, g, or t
  misc_feature (1036)..(1036): n is a, c, g, or t
  misc_feature (1041)..(1041): n is a, c, g, or t
  misc_feature (1044)..(1044): n is a, c, g, or t
  misc_feature (1060)..(1060): n is a, c, g, or t
  misc_feature (1077)..(1077): n is a, c, g, or t
  misc_feature (1097)..(1097): n is a, c, g, or t
  misc_feature (1101)..(1101): n is a, c, g, or t
  misc_feature (1109)..(1109): n is a, c, g, or t
  misc_feature (1113)..(1114): n is a, c, g, or t
  misc_feature (1118)..(1118): n is a, c, g, or t
  misc_feature (1134)..(1134): n is a, c, g, or t
  misc_feature (1136)..(1137): n is a, c, g, or t
  misc_feature (1140)..(1141): n is a, c, g, or t
  misc_feature (1156)..(1156): n is a, c, g, or t
  misc_feature (1158)..(1158): n is a, c, g, or t
  misc_feature (1168)..(1169): n is a, c, g, or t
  misc_feature (1175)..(1175): n is a, c, g, or t
  misc_feature (1180)..(1182): n is a, c, g, or t
  misc_feature (1186)..(1186): n is a, c, g, or t
  misc_feature (1192)..(1192): n is a, c, g, or t
  misc_feature (1198)..(1198): n is a, c, g, or t
  misc_feature (1211)..(1211): n is a, c, g, or t
  misc_feature (1213)..(1213): n is a, c, g, or t
  misc_feature (1218)..(1219): n is a, c, g, or t
  misc_feature (1235)..(1235): n is a, c, g, or t
  misc_feature (1239)..(1239): n is a, c, g, or t
  misc_feature (1242)..(1243): n is a, c, g, or t
  misc_feature (1249)..(1249): n is a, c, g, or t
  misc_feature (1265)..(1266): n is a, c, g, or t
  misc_feature (1269)..(1272): n is a, c, g, or t
  misc_feature (1275)..(1275): n is a, c, g, or t
  misc_feature (1280)..(1280): n is a, c, g, or t
  misc_feature (1286)..(1288): n is a, c, g, or t
  misc_feature (1292)..(1295): n is a, c, g, or t
  misc_feature (1303)..(1303): n is a, c, g, or t
  misc_feature (1318)..(1318): n is a, c, g, or t
  misc_feature (1327)..(1327): n is a, c, g, or t
  misc_feature (1331)..(1332): n is a, c, g, or t
  misc_feature (1338)..(1339): n is a, c, g, or t
  misc_feature (1351)..(1353): n is a, c, g, or t
  misc_feature (1356)..(1359): n is a, c, g, or t
  misc_feature (1361)..(1361): n is a, c, g, or t
  misc_feature (1367)..(1367): n is a, c, g, or t
aatagagagattactatgagaggatcgcatcaccatcaccatcacggatcctatttaggtgacactatagaatcgtcgacccacgcgtccgcccacgcgtccgctgcgagccaggattcccgatccagagacaatggccccgatgggatggagcccgaaggcgtcatcgagagtaactggaatgagattgttgacagctttgatgacatgaacctctcggagtcccttctccgtggcatctacgcctatggttttgagaagccctctgccatccagcagcgagccattctaccttgtatcaagggttatgatgtgattgctcaagcccaatctgggactgggaaaacggccacatttgccatatcgattctgcagcagattgaattagatctaaaagccacccaggccttggtcctagcacccactcgagaattggctcagcagatacagaaggtggtcatggcactaggagactacatgggcgcctcctgtcacgcctgtatcgggggcaccaacgtgcgtgctgaggtgcagaaactgcagatggaagctccccacatcatcgtgggtacccctggccgtgtgtttgatatgcttaaccggagatacctgtcccccaaatacatcaagatgtttgtactggatgaagctgacgaaatgttaagccgtggattcaaggaccagatctatgacatattccaaaagctcaacagcaacacccaggtagttttgctgtcagccacaatgccttctgatgtgcttgaggtgaccaagaagttcatgagggaccccattcggattcttgtcaagaaaggaagagttgaccctggagggtatccgccagttctacatcaacgtggaancgagaggagtggaagctggacacactatgtgacttgtatgaaancctgaccatcacccaggcagtcatctttcatcaacanccgggagaaaaggtggactggctcaccnaaaaaatgcatgctcnanatttncctgtntccnccntgcntgggaaanatggaccaaaaggacnaaacntgnttataagggagtttcnttctggctctaacaaanttttaattaccctgacctgntggncaaaaggnattnngtgncaacaggttttttaancnncannttgaccttccccccnanggggaaaatnnttcccnaaatnnntcangggganggttgncccaaaggggggntntaaanngggaaaaaaaaaaaanaccnttnnaaaatnaaacctttaaaccccnnttnnnnaanccccnaggttnnnaccnnnnggggggtnccccccccccccccngggtttttngggnnaaaaanngggggggggaannnccnnnnantttttn

SEQ ID NO: 331 - DNA, 1381 bp, Homo Sapiens
  misc_feature (467)..(467): n is a, c, g, or t
  misc_feature (800)..(800): n is a, c, g, or t
  misc_feature (901)..(901): n is a, c, g, or t
  misc_feature (919)..(919): n is a, c, g, or t
  misc_feature (923)..(923): n is a, c, g, or t
  misc_feature (959)..(959): n is a, c, g, or t
  misc_feature (990)..(990): n is a, c, g, or t
  misc_feature (1006)..(1006): n is a, c, g, or t
  misc_feature (1009)..(1009): n is a, c, g, or t
  misc_feature (1019)..(1019): n is a, c, g, or t
  misc_feature (1031)..(1032): n is a, c, g, or t
  misc_feature (1042)..(1042): n is a, c, g, or t
  misc_feature (1045)..(1045): n is a, c, g, or t
  misc_feature (1071)..(1071): n is a, c, g, or t
  misc_feature (1076)..(1076): n is a, c, g, or t
  misc_feature (1084)..(1084): n is a, c, g, or t
  misc_feature (1090)..(1090): n is a, c, g, or t
  misc_feature (1101)..(1101): n is a, c, g, or t
  misc_feature (1127)..(1128): n is a, c, g, or t
  misc_feature (1135)..(1136): n is a, c, g, or t
  misc_feature (1145)..(1145): n is a, c, g, or t
  misc_feature (1156)..(1157): n is a, c, g, or t
  misc_feature (1165)..(1165): n is a, c, g, or t
  misc_feature (1167)..(1167): n is a, c, g, or t
  misc_feature (1171)..(1171): n is a, c, g, or t
  misc_feature (1185)..(1185): n is a, c, g, or t
  misc_feature (1192)..(1192): n is a, c, g, or t
  misc_feature (1215)..(1215): n is a, c, g, or t
  misc_feature (1225)..(1225): n is a, c, g, or t
  misc_feature (1229)..(1229): n is a, c, g, or t
  misc_feature (1239)..(1241): n is a, c, g, or t
  misc_feature (1246)..(1249): n is a, c, g, or t
  misc_feature (1251)..(1253): n is a, c, g, or t
  misc_feature (1265)..(1265): n is a, c, g, or t
  misc_feature (1269)..(1269): n is a, c, g, or t
  misc_feature (1278)..(1279): n is a, c, g, or t
  misc_feature (1288)..(1292): n is a, c, g, or t
  misc_feature (1297)..(1297): n is a, c, g, or t
  misc_feature (1312)..(1312): n is a, c, g, or t
  misc_feature (1334)..(1334): n is a, c, g, or t
  misc_feature (1337)..(1337): n is a, c, g, or t
  misc_feature (1342)..(1344): n is a, c, g, or t
  misc_feature (1348)..(1349): n is a, c, g, or t
  misc_feature (1356)..(1356): n is a, c, g, or t
  misc_feature (1363)..(1363): n is a, c, g, or t
  misc_feature (1368)..(1368): n is a, c, g, or t
  misc_feature (1372)..(1372): n is a, c, g, or t
  misc_feature (1380)..(1381): n is a, c, g, or t
attagagaaattaactatgagaggatcgcatcaccatcaccatcacggatcctatttaggtgacactatagaatcgtcgacccacgcgtccgcccacgcgtccggatgtagttttctctgcgcgtgtgcgttttccctcctcccccgccctcagggtccacggccaccatggcgtattaggggcagcagtgcctgcggcagcattggcctttgcagcggcggcagcagcaccaggctctgcagcggcaacccccagcggcttaagccatggcgcttctcacggcattcagcagcagcgttgctgtaaccgacaaagacaccttcgaattaagcacattcctcgattccagcaaagcaccgcaacatgaccgaaatgagcttcctgagcagcgaggtgttggtgggggacttgatgtcccccttcgacccgtcgggtttgggggctgaagaaagcctaggtctcttanatgattacctggaggtggccaagcacttcaaacctcatgggttctccagcgacaaggctaaggcgggctcctccgaatggctggctgtggatgggttggtcagtccctccaacaacagcaaggaggatgccttctccgggacagattggatgttggagaaaatggatttgaaggagttcgacttggatgccctgttgggtatagatgacctggaaaccatgccagatgaccttctgaccacgttggatgacacttgtgatctctttgcccccctagtccaggagactaataagcagcccccccagacggtgaacccaattggccatctcccanaaagtttaacaaaacccgaccaggttgcccccttcaccttcttacaacctcttcccctttccccaggggtcctgtcctccactccagatcattcctttaanttaaaagctggggcaatngaantggatatcactgaaagaaaaaagaagccaaaactanactggcttacgttgccatgaatcccctcagngcaaaaaggaaggaanaanccccccttcnaaaaaaggaaannggcatctggnaanaaacccaaaaatcttattggggggtntcctnaaaaaaancccctnttacaaggggntttccaaaaaaaaaccccccatcccnnggggttnntgggggtcngccctccaaanntaaaaatncnctgnaaaaaaaaggtacncaaaaanaagggggaaaaattggaaaaaanctaaaaaaangggnaaaaaaaaannnccccnnnntnnnccccaaaaaaangggnaaaagaggnnttatggggnnnnnaaaantgaaaaaaaaaaagncttaaaaaaaggggaatcccgncangaaannnttcnnaaaaatnaaaaaanccccngggnggaaaaann

SEQ ID NO: 332 - DNA, 1391 bp, Homo Sapiens
  misc_feature (677)..(677): n is a, c, g, or t
  misc_feature (684)..(684): n is a, c, g, or t
  misc_feature (819)..(819): n is a, c, g, or t
  misc_feature (833)..(833): n is a, c, g, or t
  misc_feature (867)..(867): n is a, c, g, or t
  misc_feature (872)..(872): n is a, c, g, or t
  misc_feature (877)..(877): n is a, c, g, or t
  misc_feature (958)..(958): n is a, c, g, or t
  misc_feature (963)..(963): n is a, c, g, or t
  misc_feature (965)..(965): n is a, c, g, or t
  misc_feature (974)..(974): n is a, c, g, or t
  misc_feature (1002)..(1002): n is a, c, g, or t
  misc_feature (1006)..(1006): n is a, c, g, or t
  misc_feature (1013)..(1013): n is a, c, g, or t
  misc_feature (1021)..(1021): n is a, c, g, or t
  misc_feature (1032)..(1032): n is a, c, g, or t
  misc_feature (1035)..(1035): n is a, c, g, or t
  misc_feature (1066)..(1066): n is a, c, g, or t
  misc_feature (1071)..(1071): n is a, c, g, or t
  misc_feature (1074)..(1074): n is a, c, g, or t
  misc_feature (1077)..(1077): n is a, c, g, or t
  misc_feature (1080)..(1080): n is a, c, g, or t
  misc_feature (1119)..(1119): n is a, c, g, or t
  misc_feature (1125)..(1125): n is a, c, g, or t
  misc_feature (1127)..(1127): n is a, c, g, or t
  misc_feature (1129)..(1129): n is a, c, g, or t
  misc_feature (1138)..(1138): n is a, c, g, or t
  misc_feature (1144)..(1145): n is a, c, g, or t
  misc_feature (1148)..(1148): n is a, c, g, or t
  misc_feature (1175)..(1175): n is a, c, g, or t
  misc_feature (1181)..(1181): n is a, c, g, or t
  misc_feature (1184)..(1185): n is a, c, g, or t
  misc_feature (1197)..(1197): n is a, c, g, or t
  misc_feature (1201)..(1201): n is a, c, g, or t
  misc_feature (1221)..(1221): n is a, c, g, or t
  misc_feature (1226)..(1226): n is a, c, g, or t
  misc_feature (1232)..(1232): n is a, c, g, or t
  misc_feature (1241)..(1241): n is a, c, g, or t
  misc_feature (1243)..(1243): n is a, c, g, or t
  misc_feature (1257)..(1258): n is a, c, g, or t
  misc_feature (1262)..(1264): n is a, c, g, or t
  misc_feature (1267)..(1267): n is a, c, g, or t
  misc_feature (1269)..(1270): n is a, c, g, or t
  misc_feature (1274)..(1274): n is a, c, g, or t
  misc_feature (1287)..(1287): n is a, c, g, or t
  misc_feature (1292)..(1292): n is a, c, g, or t
  misc_feature (1297)..(1299): n is a, c, g, or t
  misc_feature (1302)..(1303): n is a, c, g, or t
  misc_feature (1306)..(1307): n is a, c, g, or t
  misc_feature (1311)..(1311): n is a, c, g, or t
  misc_feature (1322)..(1322): n is a, c, g, or t
  misc_feature (1330)..(1334): n is a, c, g, or t
  misc_feature (1336)..(1337): n is a, c, g, or t
  misc_feature (1341)..(1342): n is a, c, g, or t
  misc_feature (1349)..(1353): n is a, c, g, or t
  misc_feature (1359)..(1359): n is a, c, g, or t
  misc_feature (1381)..(1381): n is a, c, g, or t
  misc_feature (1391)..(1391): n is a, c, g, or t
agagagattactatgagaggatcgcatcaccatcaccatcacggatcctatttaggtgacactatagaatcgtcgacccacgcgtccgcccacgcgtccggtgagtcggagctctatggaggtggcagcgggtaccgagtggcggctgcagcagcgactcctctgagctgagtttgaggccgtccccgactccttcctcccccttccctccccctttttttttgttttccgttcccctttcccctcccttccctatccccgacgaccggatcctgaggaggcagctgcggtggcagctgctgagttctcggtgaaggtatttcatttctcctgtcccctcaggaccctaccccaccctctttgaaaagacaaagctctgcctacatagaagactttttttattttaaccaaagttactgttgtttacagtgagtttggggaaaaaaaataaaataaaaatggctttcccagtccttgcatcaacgggatgccacatttcataactgtttttaatggtaaaaaaaaaaaaaaaaaaatacaaaaaaaaaattctgaaggacaaaaaaggtgactgctgaactgtgtgtggtttattgttgtacattcacaatcttgcaggagccaagaagttcgcagttgtgaacagaccctgttcactggagaggcctgtgcagtanagtgtanaccctttcatgtactgtactgtacacctgatactgtaaacatactgtaataataatgtctcacatggaaacagaaaacgctgggtcagcagcaagctgtagtttttaaaaatgtttttagttaaacgttgagganaaaaagtctctccngtttctctctcctccttccacctcccttccctcnatcanctcangccttttctgttccttggcctcaccttactcccctcaggaccctaccccaccctctttgaaaaaaaaagctctgcctaaanaaaanantttttttantttaaccaaagttactgttgtttacagngaanttggggnaaaaaaanaaaaaaaaaanggntttcccagtcctggcatcaacgggaagcccnatttncanaanggnttttaaagggaaaaaaaaaaaaaaaggggggcccccccnaaaggngncnaaaaaactnaataannganctgggacccggtgaaaaatccgaaagnaccccnaanncccccggaattntttnaaacccgggggccccggggnttttntggggnaaaccaacnancttggggaaatttnngggnnnggnanntaangggaaaaaaaccnggganccccnnnaannccnngggnccaaaaaattnggggtttnnnnngnngggnnaaaaaannnnnggaaanggctttaaaaaaaaaaaaaaantttttctttn

SEQ ID NO: 333 - DNA, 1205 bp, Homo Sapiens; identical to SEQ ID NO: 293
  misc_feature (815)..(815): n is a, c, g, or t
  misc_feature (858)..(858): n is a, c, g, or t
  misc_feature (871)..(871): n is a, c, g, or t
  misc_feature (903)..(903): n is a, c, g, or t
  misc_feature (921)..(921): n is a, c, g, or t
  misc_feature (924)..(924): n is a, c, g, or t
  misc_feature (933)..(933): n is a, c, g, or t
  misc_feature (951)..(951): n is a, c, g, or t
  misc_feature (954)..(954): n is a, c, g, or t
  misc_feature (968)..(968): n is a, c, g, or t
  misc_feature (971)..(971): n is a, c, g, or t
  misc_feature (976)..(976): n is a, c, g, or t
  misc_feature (978)..(978): n is a, c, g, or t
  misc_feature (998)..(998): n is a, c, g, or t
  misc_feature (1004)..(1004): n is a, c, g, or t
  misc_feature (1010)..(1010): n is a, c, g, or t
  misc_feature (1013)..(1013): n is a, c, g, or t
  misc_feature (1026)..(1026): n is a, c, g, or t
  misc_feature (1032)..(1032): n is a, c, g, or t
  misc_feature (1040)..(1040): n is a, c, g, or t
  misc_feature (1043)..(1043): n is a, c, g, or t
  misc_feature (1051)..(1051): n is a, c, g, or t
  misc_feature (1058)..(1058): n is a, c, g, or t
  misc_feature (1061)..(1061): n is a, c, g, or t
  misc_feature (1064)..(1064): n is a, c, g, or t
  misc_feature (1077)..(1077): n is a, c, g, or t
  misc_feature (1092)..(1092): n is a, c, g, or t
  misc_feature (1097)..(1099): n is a, c, g, or t
  misc_feature (1104)..(1104): n is a, c, g, or t
  misc_feature (1110)..(1110): n is a, c, g, or t
  misc_feature (1115)..(1115): n is a, c, g, or t
  misc_feature (1122)..(1123): n is a, c, g, or t
  misc_feature (1134)..(1134): n is a, c, g, or t
  misc_feature (1136)..(1136): n is a, c, g, or t
  misc_feature (1143)..(1143): n is a, c, g, or t
  misc_feature (1151)..(1152): n is a, c, g, or t
  misc_feature (1155)..(1157): n is a, c, g, or t
  misc_feature (1161)..(1161): n is a, c, g, or t
  misc_feature (1167)..(1167): n is a, c, g, or t
  misc_feature (1169)..(1169): n is a, c, g, or t
  misc_feature (1172)..(1172): n is a, c, g, or t
  misc_feature (1174)..(1174): n is a, c, g, or t
  misc_feature (1177)..(1178): n is a, c, g, or t
  misc_feature (1181)..(1183): n is a, c, g, or t
  misc_feature (1192)..(1192): n is a, c, g, or t
  misc_feature (1196)..(1197): n is a, c, g, or t
  misc_feature (1202)..(1202): n is a, c, g, or t

SEQ ID NO: 334 - DNA, 1383 bp, Homo Sapiens
  misc_feature (1)..(2): n is a, c, g, or t
  misc_feature (486)..(486): n is a, c, g, or t
  misc_feature (624)..(624): n is a, c, g, or t
  misc_feature (748)..(748): n is a, c, g, or t
  misc_feature (756)..(756): n is a, c, g, or t
  misc_feature (758)..(758): n is a, c, g, or t
  misc_feature (769)..(769): n is a, c, g, or t
  misc_feature (773)..(773): n is a, c, g, or t
  misc_feature (775)..(775): n is a, c, g, or t
  misc_feature (778)..(778): n is a, c, g, or t
  misc_feature (787)..(787): n is a, c, g, or t
  misc_feature (799)..(799): n is a, c, g, or t
  misc_feature (803)..(803): n is a, c, g, or t
  misc_feature (808)..(809): n is a, c, g, or t
  misc_feature (811)..(812): n is a, c, g, or t
  misc_feature (827)..(827): n is a, c, g, or t
  misc_feature (832)..(832): n is a, c, g, or t
  misc_feature (837)..(837): n is a, c, g, or t
  misc_feature (842)..(842): n is a, c, g, or t
  misc_feature (861)..(863): n is a, c, g, or t
  misc_feature (882)..(882): n is a, c, g, or t
  misc_feature (886)..(886): n is a, c, g, or t
  misc_feature (890)..(890): n is a, c, g, or t
  misc_feature (898)..(898): n is a, c, g, or t
  misc_feature (903)..(904): n is a, c, g, or t
  misc_feature (923)..(923): n is a, c, g, or t
  misc_feature (931)..(931): n is a, c, g, or t
  misc_feature (935)..(935): n is a, c, g, or t
  misc_feature (937)..(937): n is a, c, g, or t
  misc_feature (945)..(945): n is a, c, g, or t
  misc_feature (947)..(947): n is a, c, g, or t
  misc_feature (951)..(951): n is a, c, g, or t
  misc_feature (960)..(960): n is a, c, g, or t
  misc_feature (963)..(963): n is a, c, g, or t
  misc_feature (972)..(972): n is a, c, g, or t
  misc_feature (980)..(981): n is a, c, g, or t
  misc_feature (984)..(984): n is a, c, g, or t
  misc_feature (1002)..(1002): n is a, c, g, or t
  misc_feature (1008)..(1008): n is a, c, g, or t
  misc_feature (1010)..(1010): n is a, c, g, or t
  misc_feature (1018)..(1018): n is a, c, g, or t
  misc_feature (1020)..(1021): n is a, c, g, or t
  misc_feature (1031)..(1031): n is a, c, g, or t
  misc_feature (1038)..(1038): n is a, c, g, or t
  misc_feature (1040)..(1040): n is a, c, g, or t
  misc_feature (1048)..(1049): n is a, c, g, or t
  misc_feature (1053)..(1053): n is a, c, g, or t
  misc_feature (1064)..(1064): n is a, c, g, or t
  misc_feature (1071)..(1071): n is a, c, g, or t
  misc_feature (1073)..(1074): n is a, c, g, or t
  misc_feature (1080)..(1080): n is a, c, g, or t
  misc_feature (1084)..(1084): n is a, c, g, or t
  misc_feature (1097)..(1097): n is a, c, g, or t
  misc_feature (1101)..(1101): n is a, c, g, or t
  misc_feature (1104)..(1105): n is a, c, g, or t
  misc_feature (1109)..(1109): n is a, c, g, or t
  misc_feature (1113)..(1113): n is a, c, g, or t
  misc_feature (1120)..(1120): n is a, c, g, or t
  misc_feature (1122)..(1122): n is a, c, g, or t
  misc_feature (1125)..(1125): n is a, c, g, or t
  misc_feature (1133)..(1133): n is a, c, g, or t
  misc_feature (1135)..(1135): n is a, c, g, or t
  misc_feature (1137)..(1137): n is a, c, g, or t
  misc_feature (1144)..(1147): n is a, c, g, or t
  misc_feature (1149)..(1150): n is a, c, g, or t
  misc_feature (1155)..(1155): n is a, c, g, or t
  misc_feature (1160)..(1160): n is a, c, g, or t
  misc_feature (1174)..(1177): n is a, c, g, or t
  misc_feature (1179)..(1179): n is a, c, g, or t
  misc_feature (1186)..(1186): n is a, c, g, or t
  misc_feature (1189)..(1189): n is a, c, g, or t
  misc_feature (1191)..(1191): n is a, c, g, or t
  misc_feature (1197)..(1197): n is a, c, g, or t
  misc_feature (1199)..(1201): n is a, c, g, or t
  misc_feature (1205)..(1205): n is a, c, g, or t
  misc_feature (1208)..(1208): n is a, c, g, or t
  misc_feature (1212)..(1213): n is a, c, g, or t
  misc_feature (1224)..(1224): n is a, c, g, or t
  misc_feature (1230)..(1238): n is a, c, g, or t
  misc_feature (1249)..(1251): n is a, c, g, or t
  misc_feature (1253)..(1254): n is a, c, g, or t
  misc_feature (1256)..(1256): n is a, c, g, or t
  misc_feature (1258)..(1258): n is a, c, g, or t
  misc_feature (1261)..(1262): n is a, c, g, or t
  misc_feature (1265)..(1265): n is a, c, g, or t
  misc_feature (1270)..(1270): n is a, c, g, or t
  misc_feature (1273)..(1273): n is a, c, g, or t
  misc_feature (1276)..(1276): n is a, c, g, or t
  misc_feature (1278)..(1278): n is a, c, g, or t
  misc_feature (1281)..(1281): n is a, c, g, or t
  misc_feature (1284)..(1287): n is a, c, g, or t
  misc_feature (1289)..(1289): n is a, c, g, or t
  misc_feature (1291)..(1293): n is a, c, g, or t
  misc_feature (1295)..(1295): n is a, c, g, or t
  misc_feature (1305)..(1305): n is a, c, g, or t
  misc_feature (1308)..(1310): n is a, c, g, or t
  misc_feature (1312)..(1313): n is a, c, g, or t
  misc_feature (1319)..(1319): n is a, c, g, or t
  misc_feature (1329)..(1329): n is a, c, g, or t
  misc_feature (1332)..(1335): n is a, c, g, or t
  misc_feature (1338)..(1339): n is a, c, g, or t
  misc_feature (1349)..(1349): n is a, c, g, or t
  misc_feature (1357)..(1357): n is a, c, g, or t
  misc_feature (1359)..(1359): n is a, c, g, or t
  misc_feature (1367)..(1367): n is a, c, g, or t
  misc_feature (1369)..(1372): n is a, c, g, or t
  misc_feature (1374)..(1379): n is a, c, g, or t
  misc_feature (1381)..(1382): n is a, c, g, or t
nntagagagattactatgagaggatcgcatcaccatcaccatcacggatcctatttaggtgacactatagaatcgtcgacccacgcgtccgagcgcccagcctccactgctgggctgcccaccgcggggctgcccacggccactggcctgccctcgggcgcaccccccggcgtggccaccatccgccgcacaccctccaccaagcccaccgtgcgccgcgccctgtccagcgctggccccatccccatccggccgcccatcgtccctgtgaagacgcccacggtgcctgactcccccggctacatggggcccacacgggcgggcagtgaggagtgcgtcttctataccgacgagaccgcctcacccctggcaccggacctcgccaaggcctccccaaagaggctcagcctgcccaacacagcctggggcagcccatccccagaggcagccgggtaccccggggcaggggccgaggacgagcagcancagctggcggccaaccggcacagcctggtggagaagctgggggagctggtggcgggtgcccacgcactgggtgagggccagttccccttccccactgctctgtcggccacccccacggaggagacgcccaccccaccnccagacgccaccagcgaccccccggccgaagacatgctggtggccatccggcgtggggtccggctccgcaggaccgtcaccaacgacaggtcggcgccccgcatcttatgatggcgccaccctnccccatcntntcaggccccantgcnancangtggactgntctgtgatccgnaagnactcnnannaaaggcccaaccagnaaaanaaganaaganccagggcaaaggccatgcnnntttaatgaaagaacctcanttgnattncaacattnaaaanngaaattgacttttaacaanctggccangaangnaaccttgnangccntgggcctgnttncgggttctntttttatnnttnttcggtcccttcttcttncttctntnggggcctngnnttttcctaanccataanancaaaaacnngggnccctttccatnaaaaaangnncaaganttgnttttcttttacantccnggnntttncaangggtggncnttnctaaattncntnttgaaannnngnnccccntttcnttggtttaaaaccnnnncntaccctnttngntttttnannnattntcnaagnnccttttctctnaaaaannnnnnnnntttttaaaaannnanntnanttnnttnaaatnttntgnanttnagnnnnantnnnantttaaattanttnnnanncccttntttaaattanttnnnnaannaattattaanaaaaaaantntttttggnannnntnnnnnntnnt

SEQ ID NO: 335 - DNA, 1384 bp, Homo Sapiens
  misc_feature (1)..(1): n is a, c, g, or t
  misc_feature (808)..(808): n is a, c, g, or t
  misc_feature (824)..(824): n is a, c, g, or t
  misc_feature (866)..(866): n is a, c, g, or t
  misc_feature (871)..(871): n is a, c, g, or t
  misc_feature (873)..(873): n is a, c, g, or t
  misc_feature (941)..(941): n is a, c, g, or t
  misc_feature (947)..(947): n is a, c, g, or t
  misc_feature (970)..(970): n is a, c, g, or t
  misc_feature (972)..(972): n is a, c, g, or t
  misc_feature (981)..(981): n is a, c, g, or t
  misc_feature (986)..(986): n is a, c, g, or t
  misc_feature (998)..(998): n is a, c, g, or t
  misc_feature (1005)..(1006): n is a, c, g, or t
  misc_feature (1049)..(1049): n is a, c, g, or t
  misc_feature (1051)..(1051): n is a, c, g, or t
  misc_feature (1055)..(1055): n is a, c, g, or t
  misc_feature (1065)..(1065): n is a, c, g, or t
  misc_feature (1072)..(1072): n is a, c, g, or t
  misc_feature (1076)..(1076): n is a, c, g, or t
  misc_feature (1092)..(1092): n is a, c, g, or t
  misc_feature (1101)..(1101): n is a, c, g, or t
  misc_feature (1114)..(1114): n is a, c, g, or t
  misc_feature (1120)..(1121): n is a, c, g, or t
  misc_feature (1125)..(1125): n is a, c, g, or t
  misc_feature (1127)..(1127): n is a, c, g, or t
  misc_feature (1137)..(1137): n is a, c, g, or t
  misc_feature (1164)..(1164): n is a, c, g, or t
  misc_feature (1174)..(1174): n is a, c, g, or t
  misc_feature (1178)..(1178): n is a, c, g, or t
  misc_feature (1189)..(1189): n is a, c, g, or t
  misc_feature (1192)..(1192): n is a, c, g, or t
  misc_feature (1195)..(1196): n is a, c, g, or t
  misc_feature (1214)..(1214): n is a, c, g, or t
  misc_feature (1218)..(1219): n is a, c, g, or t
  misc_feature (1221)..(1221): n is a, c, g, or t
  misc_feature (1225)..(1225): n is a, c, g, or t
  misc_feature (1227)..(1227): n is a, c, g, or t
  misc_feature (1231)..(1232): n is a, c, g, or t
  misc_feature (1234)..(1234): n is a, c, g, or t
  misc_feature (1237)..(1237): n is a, c, g, or t
  misc_feature (1241)..(1241): n is a, c, g, or t
  misc_feature (1251)..(1251): n is a, c, g, or t
  misc_feature (1260)..(1260): n is a, c, g, or t
  misc_feature (1262)..(1262): n is a, c, g, or t
  misc_feature (1274)..(1274): n is a, c, g, or t
  misc_feature (1284)..(1284): n is a, c, g, or t
  misc_feature (1290)..(1290): n is a, c, g, or t
  misc_feature (1292)..(1292): n is a, c, g, or t
  misc_feature (1297)..(1298): n is a, c, g, or t
  misc_feature (1302)..(1303): n is a, c, g, or t
  misc_feature (1307)..(1309): n is a, c, g, or t
  misc_feature (1313)..(1313): n is a, c, g, or t
  misc_feature (1320)..(1320): n is a, c, g, or t
  misc_feature (1326)..(1326): n is a, c, g, or t
  misc_feature (1331)..(1331): n is a, c, g, or t
  misc_feature (1337)..(1337): n is a, c, g, or t
  misc_feature (1344)..(1344): n is a, c, g, or t
  misc_feature (1352)..(1352): n is a, c, g, or t
  misc_feature (1354)..(1355): n is a, c, g, or t
  misc_feature (1367)..(1367): n is a, c, g, or t
  misc_feature (1371)..(1371): n is a, c, g, or t
  misc_feature (1374)..(1374): n is a, c, g, or t
  misc_feature (1378)..(1379): n is a, c, g, or t
  misc_feature (1383)..(1384): n is a, c, g, or t
natagagaaattactatgagaggatcgcatcaccatcaccatcacggatcctatttaggtgacactatagaatcgtcgacccacgcgtccgtttatcttcagctccatcaccatcctggagaagggccatgccaagcactggttcagctccctgcggccaagtcgaaatgtggtcttcagcatcatcgagcatttctggagggagctgctgctgtctcagcctggagccgtggcagacgcatctgtcccaaggacccggggcgaggagctgacgggactcatggctggatcccagaaacgcctggaggacacggcgagggtcctgcaccaccagggccagcagctggacagcgtcatgagaggcctggacaagatggagtcagacctggaggtggcggacagattgctgacagaactggaatctcctgcttggtggccctttagctccaagctttggaagacaccaccggaaacaaagcccagggaagatgtctccatgaccagttgtgaaccctttgggaaagaagggatactgataaaaattcctgctgttatttcccacagaacagagtctcacgttaaaccagggaggctcaccgtccttgtgtctgggttggaaatacatgactccagttctttgctcatgcacaggtttgaaagagaagacgtggacgacatcaaggtccactcaccttacgaaattagcatccgccagcggtttattggaaagccagacatggcctatcgtttgatatctgccaagatgccagaggttatccccattttagaagtgcagttcagcaagaanatggagctgttaaaanatgcattggtgctcaaaagcgcaagaacctcttcccccgcanagaananctgctcagtctggcatgcagcatctgggctgatgggccgtaccctgcaccgtgagccacccgcagganaccagnagggcacagcactgcacctgcananaagcctgcnacccntttttgaagcanaaacccnngaactaacccaaatcctgaagaagataaaagggctggccctgnangccnaaattaaccngaaaaanaaanaaaaccctggaaggcntttcaccanctgtggaaaaggnaacttnnaccncnaaaacaaaanagggggataaaaagctgacctaagggnaaaaagtccntggntttctgtttcnccntgnnattcccctaaaagaaagntggnngnaagncnaggnntnaancctntgccccccgnagggcttcntnggagggggcccnctgggggggnttttcncngggcnncccnngggnnnagcnccccccnttggtncccgntggggnaaccccnttttttgnanntaaaatggaaangggnccnaaannttann

SEQ ID NO: 336 - DNA, 1334 bp, Homo Sapiens
  misc_feature (3)..(3): n is a, c, g, or t
  misc_feature (905)..(905): n is a, c, g, or t
  misc_feature (907)..(907): n is a, c, g, or t
  misc_feature (950)..(950): n is a, c, g, or t
  misc_feature (1001)..(1001): n is a, c, g, or t
  misc_feature (1029)..(1029): n is a, c, g, or t
  misc_feature (1031)..(1032): n is a, c, g, or t
  misc_feature (1037)..(1037): n is a, c, g, or t
  misc_feature (1059)..(1059): n is a, c, g, or t
  misc_feature (1067)..(1067): n is a, c, g, or t
  misc_feature (1070)..(1070): n is a, c, g, or t
  misc_feature (1073)..(1073): n is a, c, g, or t
  misc_feature (1087)..(1087): n is a, c, g, or t
  misc_feature (1089)..(1089): n is a, c, g, or t
  misc_feature (1092)..(1092): n is a, c, g, or t
  misc_feature (1100)..(1100): n is a, c, g, or t
  misc_feature (1102)..(1102): n is a, c, g, or t
  misc_feature (1104)..(1104): n is a, c, g, or t
  misc_feature (1114)..(1114): n is a, c, g, or t
  misc_feature (1122)..(1122): n is a, c, g, or t
  misc_feature (1127)..(1127): n is a, c, g, or t
  misc_feature (1135)..(1135): n is a, c, g, or t
  misc_feature (1142)..(1164): n is a, c, g, or t
  misc_feature (1171)..(1171): n is a, c, g, or t
  misc_feature (1173)..(1173): n is a, c, g, or t
  misc_feature (1191)..(1191): n is a, c, g, or t
  misc_feature (1193)..(1193): n is a, c, g, or t
  misc_feature (1196)..(1196): n is a, c, g, or t
  misc_feature (1200)..(1201): n is a, c, g, or t
  misc_feature (1203)..(1205): n is a, c, g, or t
  misc_feature (1207)..(1207): n is a, c, g, or t
  misc_feature (1209)..(1211): n is a, c, g, or t
  misc_feature (1215)..(1215): n is a, c, g, or t
  misc_feature (1217)..(1217): n is a, c, g, or t
  misc_feature (1219)..(1220): n is a, c, g, or t
  misc_feature (1224)..(1226): n is a, c, g, or t
  misc_feature (1228)..(1229): n is a, c, g, or t
  misc_feature (1234)..(1234): n is a, c, g, or t
  misc_feature (1237)..(1238): n is a, c, g, or t
  misc_feature (1241)..(1243): n is a, c, g, or t
  misc_feature (1248)..(1248): n is a, c, g, or t
  misc_feature (1251)..(1251): n is a, c, g, or t
  misc_feature (1255)..(1255): n is a, c, g, or t
  misc_feature (1257)..(1257): n is a, c, g, or t
  misc_feature (1260)..(1260): n is a, c, g, or t
  misc_feature (1267)..(1267): n is a, c, g, or t
  misc_feature (1271)..(1271): n is a, c, g, or t
  misc_feature (1274)..(1280): n is a, c, g, or t
  misc_feature (1283)..(1284): n is a, c, g, or t
  misc_feature (1288)..(1288): n is a, c, g, or t
  misc_feature (1298)..(1298): n is a, c, g, or t
  misc_feature (1300)..(1301): n is a, c, g, or t
  misc_feature (1304)..(1305): n is a, c, g, or t
  misc_feature (1311)..(1313): n is a, c, g, or t
  misc_feature (1318)..(1318): n is a, c, g, or t
  misc_feature (1320)..(1321): n is a, c, g, or t
  misc_feature (1325)..(1327): n is a, c, g, or t
  misc_feature (1332)..(1332): n is a, c, g, or t
  misc_feature (1334)..(1334): n is a, c, g, or t
acngaggaaattactatgagaggatcgcatcaccatcaccatcacgggatcctatttaggtgacactatagaatcgtcgacccacgcgtccgctgccgggcgctccgcgaagatgcagctcaagccgatggagatcaaccccgagatgctgaacaaagtgctgtcccggctgggggtcgccggccagtggcgcttcgtggacgtgctggggctggaagaggagtctctgggctcggtgccagcgcctgcctgcgcgctgctgctgctgtttcccctcacggcccagcatgagaacttcaggaaaaagcagattgaagagctgaagggacaagaagttagtcctaaagtgtacttcatgaagcagaccattgggaattcctgtggcacaatcggacttattcacgcagtggccaataatcaagacaaactgggatttgaggatggatcagttctgaaacagtttctttctgaaacagagaaaatgtcccctgaagacagagcaaaatgctttgaaaagaatgaggccatacaggcagcccatgatgccgtggcacaggaaggccaatgtcgggtagatgacaaggtgaatttccattttattctgtttaacaacgtggatggccacctctatgaacttgatggacgaatgccttttccggtgaaccatggcgccagttcagaggacaccctgctgaaggacgctgccaaggtctgcagagaattcaccgagcgtgagcaaggagaagtccgcttctctgccgtggctctctgcaaggcagcctaatgctctgtgggagggactttgctgatttcccctcttcccttcaacatgaaaatatatacccccccatgcagtctaaaatgcttcagtacttgtgaaacacagctgttcttctgttctgcananacgccttcccctcagccacacccaggcacttaagcacaagcanagtgcacagctgtccactgggccattgtggtgtgagcttcaaatggtgaancattctcccagtgtatgtcttgtatccnanntctancgctttaaatggctactttggnttctgtcnggnaanttaaaaccttggangnggnttaattgntngnccccaaaagnaaaaaaanttttntgctgaanaaaaaannnnnnnnnnnnnnnnnnnnnnnaaagggngncccccccccaaagggggncnaanaaanntnnntnannnaacntngnncccnnntnnaaaanccnnaannnccccnaancccntnggnttttttnaaanccnnnnnnnccnngggntttttttttngnnaanncccccnnntgggnanntttnnnaaaanan

SEQ ID NO: 337 - DNA, 1536 bp, Homo Sapiens
  misc_feature (37)..(37): n is a, c, g, or t
  misc_feature (39)..(39): n is a, c, g, or t
  misc_feature (46)..(46): n is a, c, g, or t
  misc_feature (97)..(97): n is a, c, g, or t
  misc_feature (112)..(112): n is a, c, g, or t
  misc_feature (115)..(115): n is a, c, g, or t
  misc_feature (243)..(243): n is a, c, g, or t
  misc_feature (384)..(384): n is a, c, g, or t
  misc_feature (475)..(475): n is a, c, g, or t
  misc_feature (508)..(508): n is a, c, g, or t
  misc_feature (515)..(515): n is a, c, g, or t
  misc_feature (522)..(522): n is a, c, g, or t
  misc_feature (530)..(530): n is a, c, g, or t
  misc_feature (541)..(541): n is a, c, g, or t
  misc_feature (546)..(546): n is a, c, g, or t
  misc_feature (552)..(552): n is a, c, g, or t
  misc_feature (557)..(558): n is a, c, g, or t
  misc_feature (576)..(577): n is a, c, g, or t
  misc_feature (579)..(580): n is a, c, g, or t
  misc_feature (586)..(586): n is a, c, g, or t
  misc_feature (591)..(591): n is a, c, g, or t
  misc_feature (595)..(595): n is a, c, g, or t
  misc_feature (597)..(598): n is a, c, g, or t
  misc_feature (602)..(602): n is a, c, g, or t
  misc_feature (607)..(607): n is a, c, g, or t
  misc_feature (618)..(618): n is a, c, g, or t
  misc_feature (621)..(622): n is a, c, g, or t
  misc_feature (628)..(629): n is a, c, g, or t
  misc_feature (631)..(631): n is a, c, g, or t
  misc_feature (639)..(639): n is a, c, g, or t
  misc_feature (641)..(642): n is a, c, g, or t
  misc_feature (648)..(650): n is a, c, g, or t
  misc_feature (662)..(663): n is a, c, g, or t
  misc_feature (666)..(666): n is a, c, g, or t
  misc_feature (669)..(669): n is a, c, g, or t
  misc_feature (684)..(684): n is a, c, g, or t
  misc_feature (686)..(686): n is a, c, g, or t
  misc_feature (694)..(695): n is a, c, g, or t
  misc_feature (698)..(699): n is a, c, g, or t
  misc_feature (709)..(709): n is a, c, g, or t
  misc_feature (711)..(713): n is a, c, g, or t
  misc_feature (717)..(719): n is a, c, g, or t
  misc_feature (725)..(731): n is a, c, g, or t
  misc_feature (741)..(741): n is a, c, g, or t
  misc_feature (743)..(744): n is a, c, g, or t
  misc_feature (747)..(748): n is a, c, g, or t
  misc_feature (750)..(752): n is a, c, g, or t
  misc_feature (754)..(754): n is a, c, g, or t
  misc_feature (759)..(759): n is a, c, g, or t
  misc_feature (762)..(762): n is a, c, g, or t
  misc_feature (766)..(766): n is a, c, g, or t
  misc_feature (768)..(768): n is a, c, g, or t
  misc_feature (772)..(772): n is a, c, g, or t
  misc_feature (775)..(777): n is a, c, g, or t
  misc_feature (784)..(784): n is a, c, g, or t
  misc_feature (787)..(787): n is a, c, g, or t
  misc_feature (792)..(792): n is a, c, g, or t
  misc_feature (795)..(795): n is a, c, g, or t
  misc_feature (800)..(800): n is a, c, g, or t
  misc_feature (804)..(805): n is a, c, g, or t
  misc_feature (811)..(811): n is a, c, g, or t
  misc_feature (813)..(813): n is a, c, g, or t
  misc_feature (815)..(815): n is a, c, g, or t
  misc_feature (822)..(825): n is a, c, g, or t
  misc_feature (828)..(828): n is a, c, g, or t
  misc_feature (830)..(831): n is a, c, g, or t
  misc_feature (835)..(835): n is a, c, g, or t
  misc_feature (838)..(839): n is a, c, g, or t
  misc_feature (845)..(845): n is a, c, g, or t
  misc_feature (848)..(850): n is a, c, g, or t
  misc_feature (856)..(856): n is a, c, g, or t
  misc_feature (859)..(860): n is a, c, g, or t
  misc_feature (865)..(866): n is a, c, g, or t
  misc_feature (869)..(869): n is a, c, g, or t
  misc_feature (873)..(873): n is a, c, g, or t
  misc_feature (875)..(876): n is a, c, g, or t
  misc_feature (880)..(881): n is a, c, g, or t
  misc_feature (888)..(888): n is a, c, g, or t
  misc_feature (891)..(891): n is a, c, g, or t
  misc_feature (893)..(896): n is a, c, g, or t
  misc_feature (899)..(899): n is a, c, g, or t
  misc_feature (905)..(905): n is a, c, g, or t
  misc_feature (907)..(907): n is a, c, g, or t
  misc_feature (909)..(909): n is a, c, g, or t
  misc_feature (912)..(912): n is a, c, g, or t
  misc_feature (914)..(915): n is a, c, g, or t
  misc_feature (919)..(919): n is a, c, g, or t
  misc_feature (922)..(922): n is a, c, g, or t
  misc_feature (924)..(924): n is a, c, g, or t
  misc_feature (929)..(929): n is a, c, g, or t
  misc_feature (936)..(936): n is a, c, g, or t
  misc_feature (939)..(939): n is a, c, g, or t
  misc_feature (942)..(942): n is a, c, g, or t
  misc_feature (948)..(948): n is a, c, g, or t
  misc_feature (953)..(954): n is a, c, g, or t
  misc_feature (956)..(957): n is a, c, g, or t
  misc_feature (978)..(978): n is a, c, g, or t
  misc_feature (982)..(982): n is a, c, g, or t
  misc_feature (984)..(984): n is a, c, g, or t
  misc_feature (989)..(990): n is a, c, g, or t
  misc_feature (992)..(992): n is a, c, g, or t
  misc_feature (1000)..(1000): n is a, c, g, or t
  misc_feature (1013)..(1014): n is a, c, g, or t
  misc_feature (1018)..(1018): n is a, c, g, or t
  misc_feature (1023)..(1025): n is a, c, g, or t
  misc_feature (1028)..(1029): n is a, c, g, or t
  misc_feature (1034)..(1034): n is a, c, g, or t
  misc_feature (1036)..(1036): n is a, c, g, or t
  misc_feature (1041)..(1042): n is a, c, g, or t
  misc_feature (1045)..(1045): n is a, c, g, or t
  misc_feature (1049)..(1049): n is a, c, g, or t
  misc_feature (1051)..(1052): n is a, c, g, or t
  misc_feature (1057)..(1057): n is a, c, g, or t
  misc_feature (1060)..(1060): n is a, c, g, or t
  misc_feature (1065)..(1065): n is a, c, g, or t
  misc_feature (1069)..(1069): n is a, c, g, or t
  misc_feature (1073)..(1073): n is a, c, g, or t
  misc_feature (1075)..(1077): n is a, c, g, or t
  misc_feature (1088)..(1088): n is a, c, g, or t
  misc_feature (1094)..(1094): n is a, c, g, or t
  misc_feature (1096)..(1097): n is a, c, g, or t
  misc_feature (1100)..(1100): n is a, c, g, or t
  misc_feature (1109)..(1109): n is a, c, g, or t
  misc_feature (1112)..(1112): n is a, c, g, or t
  misc_feature (1127)..(1129): n is a, c, g, or t
  misc_feature (1132)..(1132): n is a, c, g, or t
  misc_feature (1139)..(1139): n is a, c, g, or t
  misc_feature (1149)..(1150): n is a, c, g, or t
  misc_feature (1159)..(1159): n is a, c, g, or t
  misc_feature (1167)..(1167): n is a, c, g, or t
  misc_feature (1173)..(1173): n is a, c, g, or t
  misc_feature (1177)..(1177): n is a, c, g, or t
  misc_feature (1182)..(1183): n is a, c, g, or t
  misc_feature (1189)..(1191): n is a, c, g, or t
  misc_feature (1195)..(1196): n is a, c, g, or t
  misc_feature (1201)..(1201): n is a, c, g, or t
  misc_feature (1204)..(1204): n is a, c, g, or t
  misc_feature (1214)..(1214): n is a, c, g, or t
  misc_feature (1216)..(1216): n is a, c, g, or t
  misc_feature (1218)..(1218): n is a, c, g, or t
  misc_feature (1228)..(1228): n is a, c, g, or t
  misc_feature (1236)..(1236): n is a, c, g, or t
  misc_feature (1240)..(1240): n is a, c, g, or t
  misc_feature (1245)..(1245): n is a, c, g, or t
  misc_feature (1249)..(1249): n is a, c, g, or t
  misc_feature (1255)..(1256): n is a, c, g, or t
  misc_feature (1258)..(1258): n is a, c, g, or t
  misc_feature (1263)..(1263): n is a, c, g, or t
  misc_feature (1268)..(1268): n is a, c, g, or t
  misc_feature (1275)..(1276): n is a, c, g, or t
  misc_feature (1280)..(1280): n is a, c, g, or t
  misc_feature (1283)..(1284): n is a, c, g, or t
  misc_feature (1290)..(1292): n is a, c, g, or t
  misc_feature (1298)..(1298): n is a, c, g, or t
  misc_feature (1311)..(1311): n is a, c, g, or t
  misc_feature (1313)..(1313): n is a, c, g, or t
  misc_feature (1315)..(1316): n is a, c, g, or t
  misc_feature (1322)..(1322): n is a, c, g, or t
  misc_feature (1333)..(1333): n is a, c, g, or t
  misc_feature (1337)..(1339): n is a, c, g, or t
  misc_feature (1345)..(1345): n is a, c, g, or t
  misc_feature (1354)..(1354): n is a, c, g, or t
  misc_feature (1358)..(1358): n is a, c, g, or t
  misc_feature (1360)..(1362): n is a, c, g, or t
  misc_feature (1369)..(1369): n is a, c, g, or t
  misc_feature (1374)..(1374): n is a, c, g, or t
  misc_feature (1381)..(1381): n is a, c, g, or t
  misc_feature (1389)..(1390): n is a, c, g, or t
  misc_feature (1395)..(1395): n is a, c, g, or t
  misc_feature (1398)..(1398): n is a, c, g, or t
  misc_feature (1401)..(1401): n is a, c, g, or t
  misc_feature (1403)..(1404): n is a, c, g, or t
  misc_feature (1408)..(1409): n is a, c, g, or t
  misc_feature (1414)..(1414): n is a, c, g, or t
  misc_feature (1416)..(1418): n is a, c, g, or t
  misc_feature (1423)..(1423): n is a, c, g, or t
  misc_feature (1425)..(1425): n is a, c, g, or t
  misc_feature (1429)..(1429): n is a, c, g, or t
  misc_feature (1437)..(1437): n is a, c, g, or t
  misc_feature (1439)..(1439): n is a, c, g, or t
  misc_feature (1441)..(1442): n is a, c, g, or t
  misc_feature (1445)..(1445): n is a, c, g, or t
  misc_feature (1453)..(1454): n is a, c, g, or t
  misc_feature (1459)..(1459): n is a, c, g, or t
  misc_feature (1468)..(1469): n is a, c, g, or t
  misc_feature (1473)..(1473): n is a, c, g, or t
  misc_feature (1482)..(1483): n is a, c, g, or t
  misc_feature (1486)..(1486): n is a, c, g, or t
  misc_feature (1489)..(1489): n is a, c, g, or t
  misc_feature (1510)..(1510): n is a, c, g, or t
  misc_feature (1520)..(1520): n is a, c, g, or t
  misc_feature (1522)..(1524): n is a, c, g, or t
  misc_feature (1528)..(1528): n is a, c, g, or t
  misc_feature (1530)..(1530): n is a, c, g, or t
  misc_feature (1533)..(1533): n is a, c, g, or t
gagagattactatgagaggatcgcatcaccatcaccntnacggatnctatttaggtgacactatagaatcgtcgacccacgcgtccgtgcgctgtgntcgaggggtgccggncangcctgagcgagcgagctagccagcaggcatcgagggggcgcggctgccgtccggacgagacaggcgaacccgacgcataagagtccaccaccggacagccagcacatccacgatggagcgtcttgtcncccgtgggaccttcccagtactagtgcgcaccagcgcctgccgcagcctcttcgggccggtggaccacgaggagctgagccgcgagctgcaggcccgcctggccgagctgaacgccgaggaccagaaccgctgggattacnacttccagcaggacatgccgctgcggggccctggacgcctgcagtggaccgaagtggacagcgactcggtgcccgcgttctaccgcgaganggtgcaggtggggcgctgccgcctgctgctggngccgcgncccgtcncggtcgcngtggttgtcancccgnccctcnagccnnccgctgattctctcgaanngnntctagnacgcnccgnannaagnttccntagtgacccgntcnncggttnncntttgtctntnnacgacnnnaatttcctatcnnttntantcagaattcaatctnantatccatnntannatttatagtntnnnattnnnttattnnnnnnnatatattaantnnttnncnnntnttttnttncaanantctnttnnnacttatntcnaatanctncattnactnntatatntntnacttatnnnnttntnnttancanntatttnttnnntttttntannaaatnntanatcnannttanntttatanttnannnntcnatatantntnttnannaaanatntntaaancattaantantanaaatanaatannanntttaaaatttaaataaatatnttantnttttnntnaaaataanctaaaatataatnnatcnataannnttnntcaanangtttnntcnaatntnntaatnttntattncatnaatnannntcaacttttancttttntnnatnaataaaaanttnattttttttttaacnnntanatctatnttatacactnnttatttcanatatgtantaaatngatnaatannttttannntacnnataantantataaatatnancnctaaatttcnatatttancttnacaanttantatatnntnaacanatacntcaatanntaanttnntatatnnncatatntatatttttaaananannttcaanatgattaatcntatnnnctccantctaataancacntnnntaacatntaacnatatatnatcttatnnttatnatnttnannatanntattntnnntactntnacanttatttanananntanaatattanntattnatataatanntttnaccacacanngtntantttaaaattcaatatatatcnctatatattncnnnttantnatncta

SEQ ID NO: 338 - DNA, 1487 bp, Homo Sapiens
  misc_feature (27)..(27): n is a, c, g, or t
  misc_feature (44)..(44): n is a, c, g, or t
  misc_feature (47)..(47): n is a, c, g, or t
  misc_feature (56)..(57): n is a, c, g, or t
  misc_feature (95)..(95): n is a, c, g, or t
  misc_feature (99)..(99): n is a, c, g, or t
  misc_feature (105)..(105): n is a, c, g, or t
  misc_feature (120)..(120): n is a, c, g, or t
  misc_feature (144)..(144): n is a, c, g, or t
  misc_feature (153)..(153): n is a, c, g, or t
  misc_feature (164)..(164): n is a, c, g, or t
  misc_feature (167)..(167): n is a, c, g, or t
  misc_feature (170)..(170): n is a, c, g, or t
  misc_feature (185)..(185): n is a, c, g, or t
  misc_feature (218)..(218): n is a, c, g, or t
  misc_feature (223)..(223): n is a, c, g, or t
  misc_feature (241)..(241): n is a, c, g, or t
  misc_feature (253)..(253): n is a, c, g, or t
  misc_feature (257)..(257): n is a, c, g, or t
  misc_feature (276)..(276): n is a, c, g, or t
  misc_feature (335)..(335): n is a, c, g, or t
  misc_feature (377)..(377): n is a, c, g, or t
  misc_feature (379)..(379): n is a, c, g, or t
  misc_feature (394)..(394): n is a, c, g, or t
  misc_feature (397)..(397): n is a, c, g, or t
  misc_feature (400)..(400): n is a, c, g, or t
  misc_feature (450)..(450): n is a, c, g, or t
  misc_feature (460)..(460): n is a, c, g, or t
  misc_feature (472)..(472): n is a, c, g, or t
  misc_feature (474)..(474): n is a, c, g, or t
  misc_feature (488)..(488): n is a, c, g, or t
  misc_feature (498)..(499): n is a, c, g, or t
  misc_feature (504)..(504): n is a, c, g, or t
  misc_feature (507)..(507): n is a, c, g, or t
  misc_feature (523)..(523): n is a, c, g, or t
  misc_feature (553)..(554): n is a, c, g, or t
  misc_feature (564)..(564): n is a, c, g, or t
  misc_feature (566)..(566): n is a, c, g, or t
  misc_feature (583)..(583): n is a, c, g, or t
  misc_feature (591)..(591): n is a, c, g, or t
  misc_feature (598)..(598): n is a, c, g, or t
  misc_feature (617)..(617): n is a, c, g, or t
  misc_feature (620)..(620): n is a, c, g, or t
  misc_feature (628)..(628): n is a, c, g, or t
  misc_feature (633)..(633): n is a, c, g, or t
  misc_feature (653)..(653): n is a, c, g, or t
  misc_feature (663)..(663): n is a, c, g, or t
  misc_feature (666)..(666): n is a, c, g, or t
  misc_feature (678)..(678): n is a, c, g, or t
  misc_feature (690)..(690): n is a, c, g, or t
  misc_feature (692)..(692): n is a, c, g, or t
  misc_feature (694)..(694): n is a, c, g, or t
  misc_feature (696)..(696): n is a, c, g, or t
  misc_feature (701)..(701): n is a, c, g, or t
  misc_feature (708)..(708): n is a, c, g, or t
  misc_feature (710)..(711): n is a, c, g, or t
  misc_feature (714)..(714): n is a, c, g, or t
  misc_feature (718)..(718): n is a, c, g, or t
  misc_feature (726)..(726): n is a, c, g, or t
  misc_feature (743)..(743): n is a, c, g, or t
  misc_feature (749)..(749): n is a, c, g, or t
  misc_feature (751)..(751): n is a, c, g, or t
  misc_feature (753)..(754): n is a, c, g, or t
  misc_feature (764)..(764): n is a, c, g, or t
  misc_feature (772)..(772): n is a, c, g, or t
  misc_feature (774)..(774): n is a, c, g, or t
  misc_feature (777)..(779): n is a, c, g, or t
  misc_feature (786)..(787): n is a, c, g, or t
  misc_feature (790)..(790): n is a, c, g, or t
  misc_feature (800)..(800): n is a, c, g, or t
  misc_feature (802)..(802): n is a, c, g, or t
  misc_feature (807)..(807): n is a, c, g, or t
  misc_feature (810)..(811): n is a, c, g, or t
  misc_feature (823)..(823): n is a, c, g, or t
  misc_feature (825)..(825): n is a, c, g, or t
  misc_feature (832)..(833): n is a, c, g, or t
  misc_feature (841)..(841): n is a, c, g, or t
  misc_feature (844)..(845): n is a, c, g, or t
  misc_feature (851)..(852): n is a, c, g, or t
  misc_feature (867)..(868): n is a, c, g, or t
  misc_feature (874)..(874): n is a, c, g, or t
  misc_feature (876)..(877): n is a, c, g, or t
  misc_feature (886)..(886): n is a, c, g, or t
  misc_feature (894)..(894): n is a, c, g, or t
  misc_feature (903)..(903): n is a, c, g, or t
  misc_feature (909)..(910): n is a, c, g, or t
  misc_feature (912)..(915): n is a, c, g, or t
  misc_feature (918)..(918): n is a, c, g, or t
  misc_feature (924)..(924): n is a, c, g, or t
  misc_feature (928)..(928): n is a, c, g, or t
  misc_feature (931)..(931): n is a, c, g, or t
  misc_feature (933)..(933): n is a, c, g, or t
  misc_feature (937)..(938): n is a, c, g, or t
  misc_feature (941)..(941): n is a, c, g, or t
  misc_feature (943)..(943): n is a, c, g, or t
  misc_feature (948)..(948): n is a, c, g, or t
  misc_feature (953)..(955): n is a, c, g, or t
  misc_feature (960)..(960): n is a, c, g, or t
  misc_feature (964)..(964): n is a, c, g, or t
  misc_feature (967)..(967): n is a, c, g, or t
  misc_feature (971)..(974): n is a, c, g, or t
  misc_feature (984)..(984): n is a, c, g, or t
  misc_feature (986)..(987): n is a, c, g, or t
  misc_feature (991)..(991): n is a, c, g, or t
  misc_feature (993)..(993): n is a, c, g, or t
  misc_feature (998)..(998): n is a, c, g, or t
  misc_feature (1009)..(1009): n is a, c, g, or t
  misc_feature (1018)..(1018): n is a, c, g, or t
  misc_feature (1020)..(1020): n is a, c, g, or t
  misc_feature (1022)..(1022): n is a, c, g, or t
  misc_feature (1026)..(1026): n is a, c, g, or t
  misc_feature (1028)..(1028): n is a, c, g, or t
  misc_feature (1053)..(1053): n is a, c, g, or t
  misc_feature (1057)..(1057): n is a, c, g, or t
  misc_feature (1060)..(1060): n is a, c, g, or t
  misc_feature (1065)..(1065): n is a, c, g, or t
  misc_feature (1069)..(1070): n is a, c, g, or t
  misc_feature (1072)..(1072): n is a, c, g, or t
  misc_feature (1075)..(1077): n is a, c, g, or t
  misc_feature (1079)..(1079): n is a, c, g, or t
  misc_feature (1085)..(1085): n is a, c, g, or t
  misc_feature (1089)..(1089): n is a, c, g, or t
  misc_feature (1091)..(1091): n is a, c, g, or t
  misc_feature (1093)..(1095): n is a, c, g, or t
  misc_feature (1097)..(1097): n is a, c, g, or t
  misc_feature (1103)..(1103): n is a, c, g, or t
  misc_feature (1105)..(1105): n is a, c, g, or t
  misc_feature (1111)..(1111): n is a, c, g, or t
  misc_feature (1119)..(1119): n is a, c, g, or t
  misc_feature (1121)..(1121): n is a, c, g, or t
  misc_feature (1129)..(1129): n is a, c, g, or t
  misc_feature (1133)..(1133): n is a, c, g, or t
  misc_feature (1135)..(1135): n is a, c, g, or t
  misc_feature (1139)..(1139): n is a, c, g, or t
  misc_feature (1145)..(1145): n is a, c, g, or t
  misc_feature (1147)..(1147): n is a, c, g, or t
  misc_feature (1154)..(1154): n is a, c, g, or t
  misc_feature (1157)..(1157): n is a, c, g, or t
  misc_feature (1160)..(1161): n is a, c, g, or t
  misc_feature (1163)..(1164): n is a, c, g, or t
  misc_feature (1169)..(1170): n is a, c, g, or t
  misc_feature (1172)..(1172): n is a, c, g, or t
  misc_feature (1174)..(1174): n is a, c, g, or t
  misc_feature (1178)..(1178): n is a, c, g, or t
  misc_feature (1182)..(1182): n is a, c, g, or t
  misc_feature (1188)..(1188): n is a, c, g, or t
  misc_feature (1190)..(1190): n is a, c, g, or t
  misc_feature (1195)..(1195): n is a, c, g, or t
  misc_feature (1200)..(1200): n is a, c, g, or t
  misc_feature (1208)..(1209): n is a, c, g, or t
  misc_feature (1216)..(1216): n is a, c, g, or t
  misc_feature (1219)..(1219): n is a, c, g, or t
  misc_feature (1223)..(1223): n is a, c, g, or t
  misc_feature (1225)..(1226): n is a, c, g, or t
  misc_feature (1230)..(1230): n is a, c, g, or t
  misc_feature (1237)..(1237): n is a, c, g, or t
  misc_feature (1244)..(1244): n is a, c, g, or t
  misc_feature (1246)..(1250): n is a, c, g, or t
  misc_feature (1253)..(1253): n is a, c, g, or t
  misc_feature (1258)..(1258): n is a, c, g, or t
  misc_feature (1261)..(1261): n is a, c, g, or t
  misc_feature (1266)..(1266): n is a, c, g, or t
  misc_feature (1268)..(1268): n is a, c, g, or t
  misc_feature (1274)..(1275): n is a, c, g, or t
  misc_feature (1278)..(1278): n is a, c, g, or t
  misc_feature (1281)..(1282): n is a, c, g, or t
  misc_feature (1284)..(1284): n is a, c, g, or t
  misc_feature (1292)..(1292): n is a, c, g, or t
  misc_feature (1294)..(1296): n is a, c, g, or t
  misc_feature (1299)..(1299): n is a, c, g, or t
  misc_feature (1310)..(1310): n is a, c, g, or t
  misc_feature (1317)..(1317): n is a, c, g, or t
  misc_feature (1319)..(1319): n is a, c, g, or t
  misc_feature (1323)..(1325): n is a, c, g, or t
  misc_feature (1337)..(1337): n is a, c, g, or t
  misc_feature (1340)..(1340): n is a, c, g, or t
  misc_feature (1342)..(1342): n is a, c, g, or t
  misc_feature (1350)..(1351): n is a, c, g, or t
  misc_feature (1357)..(1357): n is a, c, g, or t
  misc_feature (1359)..(1360): n is a, c, g, or t
  misc_feature (1363)..(1363): n is a, c, g, or t
  misc_feature (1370)..(1371): n is a, c, g, or t
  misc_feature (1373)..(1373): n is a, c, g, or t
  misc_feature (1384)..(1384): n is a, c, g, or t
  misc_feature (1388)..(1388): n is a, c, g, or t
  misc_feature (1391)..(1391): n is a, c, g, or t
  misc_feature (1394)..(1394): n is a, c, g, or t
  misc_feature (1404)..(1405): n is a, c, g, or t
  misc_feature (1426)..(1426): n is a, c, g, or t
  misc_feature (1432)..(1432): n is a, c, g, or t
  misc_feature (1437)..(1438): n is a, c, g, or t
  misc_feature (1441)..(1441): n is a, c, g, or t
  misc_feature (1450)..(1451): n is a, c, g, or t
  misc_feature (1459)..(1460): n is a, c, g, or t
  misc_feature (1464)..(1464): n is a, c, g, or t
  misc_feature (1471)..(1471): n is a, c, g, or t
  misc_feature (1481)..(1481): n is a, c, g, or t
  misc_feature (1486)..(1486): n is a, c, g, or t
taagagagattactatgagaggatcgnctccccctcaccatcanggntcctttttnngtgacactataaaatcgtcgacccacgcgtccggctgncagntctcgnactctgtttttccgncgctccgccgtcgcgtttctctgncggtcgcantggaaaaaganatngcngcgctggtcattganaatggcatccggcatgtgcaaagctggttttgntgggnacgacgctccccgagccntgtttccttccntcgncgggcgccccagacaccanggcgtcatggtgggcatgggccacaaggactcctacgtgggcgacgaggcccagagcangcgtggcatcctgaccctgaagtaccccattgagcatggcancntctccaactgggacnacntgnagaagatctggcaccacaccttctacaacgagctgcgcgtggccccggangagcacccantgctgctgaccnangcccccctgaaccncaaggtcaanngaganaanatgactcagattatgnttgacaccttcaacaccccggccatgtacnnggccatccangncgtgctgtccattctangcctctgngcgcacnactggcattgtcatggacnctnggagacanattcncccacacgggagccctatcnaacaagggcnaanccctcccccacnccatcttgcgtntngnanctggnttggtcngnnccntgancgactaanctcatgaaaattcctcnctgaancnanngcttacaganttcacctnanacnnncctgaannggntaaattcgtncncatanttnncgcaaaaatctntngctaacnncgtccccntgnnaatttnnaagcaaggtaaatgnnacaccngnnccttttctncgctcctntctgaaagnaaaacnnannnntcntacccngatntcnangaannatnanccttngaaannnagaantctnccnttgnnnngaaagccacngnntctnanacatnccttcctaagnaaagaaagncntngatntnttcctcaaaaacccacttaccaatnccantangtaantttnncnagnnntntccccncaanancnnntnccacanancagcancttttccntnatccccanctanantaantcgttnanttgtccnatnganngnncaaannananaccntccnctgtcncncacancctanttaaaatnnaaactantcnctcntnnaaancaaaatncacaggnannnnnatnggganccntcttncnactcannccntcnncnataaaaantnnnttntagcaattaanaaaaaangncctnnncaagtattctanttncnaataagannaaattnannaanttcattnngnacataaatatntatntcnttncaatactctnnttaactccagtgaaaaactgncaaatnatcannaanccttttatnnacatatcnnattnttaattnatatatatantcttnt

SEQ ID NO: 339 - DNA, 1360 bp, Homo Sapiens
  misc_feature (928)..(928): n is a, c, g, or t
  misc_feature (950)..(950): n is a, c, g, or t
  misc_feature (963)..(963): n is a, c, g, or t
  misc_feature (971)..(971): n is a, c, g, or t
  misc_feature (988)..(988): n is a, c, g, or t
  misc_feature (1022)..(1022): n is a, c, g, or t
  misc_feature (1059)..(1059): n is a, c, g, or t
  misc_feature (1067)..(1067): n is a, c, g, or t
  misc_feature (1072)..(1072): n is a, c, g, or t
  misc_feature (1098)..(1098): n is a, c, g, or t
  misc_feature (1109)..(1109): n is a, c, g, or t
  misc_feature (1113)..(1113): n is a, c, g, or t
  misc_feature (1115)..(1115): n is a, c, g, or t
  misc_feature (1123)..(1123): n is a, c, g, or t
  misc_feature (1135)..(1135): n is a, c, g, or t
  misc_feature (1139)..(1140): n is a, c, g, or t
  misc_feature (1151)..(1151): n is a, c, g, or t
  misc_feature (1154)..(1154): n is a, c, g, or t
  misc_feature (1172)..(1172): n is a, c, g, or t
  misc_feature (1176)..(1176): n is a, c, g, or t
  misc_feature (1184)..(1184): n is a, c, g, or t
  misc_feature (1187)..(1187): n is a, c, g, or t
  misc_feature (1191)..(1191): n is a, c, g, or t
  misc_feature (1193)..(1193): n is a, c, g, or t
  misc_feature (1195)..(1195): n is a, c, g, or t
  misc_feature (1197)..(1197): n is a, c, g, or t
  misc_feature (1199)..(1199): n is a, c, g, or t
  misc_feature (1203)..(1203): n is a, c, g, or t
  misc_feature (1207)..(1207): n is a, c, g, or t
  misc_feature (1216)..(1216): n is a, c, g, or t
  misc_feature (1220)..(1220): n is a, c, g, or t
  misc_feature (1229)..(1229): n is a, c, g, or t
  misc_feature (1240)..(1240): n is a, c, g, or t
  misc_feature (1250)..(1250): n is a, c, g, or t
  misc_feature (1252)..(1252): n is a, c, g, or t
  misc_feature (1255)..(1255): n is a, c, g, or t
  misc_feature (1271)..(1271): n is a, c, g, or t
  misc_feature (1275)..(1275): n is a, c, g, or t
  misc_feature (1286)..(1286): n is a, c, g, or t
  misc_feature (1291)..(1291): n is a, c, g, or t
  misc_feature (1294)..(1294): n is a, c, g, or t
  misc_feature (1314)..(1314): n is a, c, g, or t
  misc_feature (1316)..(1316): n is a, c, g, or t
  misc_feature (1324)..(1324): n is a, c, g, or t
  misc_feature (1336)..(1337): n is a, c, g, or t
  misc_feature (1340)..(1340): n is a, c, g, or t
  misc_feature (1342)..(1342): n is a, c, g, or t
tagagaaattactatgagaggatcgcatcaccatcaccatcacggatcctatttaggtgacactatagaatcgtcgacccacgcgtccgaccttttccccaatgatgaagacgacccagggcaaggaatccagcagcagcacagcagtgcagccgcggctgcccagcagggcggctacgagatccccgcgcggctgcggacgctccacaacctggtgatccagtacgcctcgcaggggcgctacgaggtagctgtgcccctctgcaagcaggccctggaggacctggagaagacttcaggacacgaccacccggacgtggccaccatgctcaacatcctggccttggtgtacagggatcagaataaatacaaagatgcagctaacctactgaatgatgccttggctattcgtgagaaaactttgggcaaagatcatcctgcggtggcggcgactttgaataaccttgcagtcctttatggtaaaagagggaagtacaaagaagcagagccgttgtgtaaaagagctctggaaatccgagaaaaggttttggggaaggatcaccccgatgttgccaagcagttaaataacttggccttactgtgccagaaccagggcaagtatgaagaagtagaatattattatcaaagagccctcgagatctaccagacaaaactgggacctgatgaccccaacgtggctaagacgaaaaataacctggcatcctgctatttgaaacaaggaaagttcaagcaagcagaaacactgtacaaagagattctcactcgtgcacatgaaagggagtttggttctgtagatgatgaaaataaacccatctggatgcatgctgaagaaagagaagaatgcaaaggaaagcaaagggatgggacatcttttggagagtatggcggctggtacaaagcctgcaangttgatagtccaactgttacanccactctaaaaancttggggncactttacagacgtcanggcaaatttgaagctgcaaaaacgttaaaaaaanctgctatgaggtctcgtaaacagggtcttgaaatgtnccaaacanagggnggcaaaaatgctcatgaccctgaaanatggaaaaccnagancnggaaaacntcacgggactgntcannaaaaatggccnganggagggggaaatgagaantaanccgggggntantgantntnangncccnggcnaaccccggnattncaaggttcnggggggggggncccccaattncnttntcccaggggcccgggntaanccctaaatttnaaagnccnttgaagggcctttttggggncntttggggnccttttttaaannttncnaaaaaaaaaaaaaaaaaa

SEQ ID NO: 340 - DNA, 1364 bp, Homo Sapiens
  misc_feature (802)..(802): n is a, c, g, or t
  misc_feature (992)..(992): n is a, c, g, or t
  misc_feature (1002)..(1002): n is a, c, g, or t
  misc_feature (1004)..(1004): n is a, c, g, or t
  misc_feature (1012)..(1012): n is a, c, g, or t
  misc_feature (1022)..(1022): n is a, c, g, or t
  misc_feature (1034)..(1034): n is a, c, g, or t
  misc_feature (1044)..(1044): n is a, c, g, or t
  misc_feature (1053)..(1053): n is a, c, g, or t
  misc_feature (1064)..(1064): n is a, c, g, or t
  misc_feature (1066)..(1067): n is a, c, g, or t
  misc_feature (1069)..(1069): n is a, c, g, or t
  misc_feature (1085)..(1085): n is a, c, g, or t
  misc_feature (1113)..(1113): n is a, c, g, or t
  misc_feature (1123)..(1123): n is a, c, g, or t
  misc_feature (1125)..(1125): n is a, c, g, or t
  misc_feature (1133)..(1133): n is a, c, g, or t
  misc_feature (1138)..(1138): n is a, c, g, or t
  misc_feature (1151)..(1151): n is a, c, g, or t
  misc_feature (1154)..(1154): n is a, c, g, or t
  misc_feature (1157)..(1157): n is a, c, g, or t
  misc_feature (1160)..(1160): n is a, c, g, or t
  misc_feature (1163)..(1164): n is a, c, g, or t
  misc_feature (1166)..(1166): n is a, c, g, or t
  misc_feature (1176)..(1176): n is a, c, g, or t
  misc_feature (1178)..(1178): n is a, c, g, or t
  misc_feature (1180)..(1180): n is a, c, g, or t
  misc_feature (1184)..(1184): n is a, c, g, or t
  misc_feature (1187)..(1187): n is a, c, g, or t
  misc_feature (1193)..(1193): n is a, c, g, or t
  misc_feature (1197)..(1197): n is a, c, g, or t
  misc_feature (1199)..(1199): n is a, c, g, or t
  misc_feature (1205)..(1205): n is a, c, g, or t
  misc_feature (1211)..(1211): n is a, c, g, or t
  misc_feature (1219)..(1219): n is a, c, g, or t
  misc_feature (1222)..(1222): n is a, c, g, or t
  misc_feature (1229)..(1229): n is a, c, g, or t
  misc_feature (1232)..(1232): n is a, c, g, or t
  misc_feature (1238)..(1239): n is a, c, g, or t
  misc_feature (1243)..(1243): n is a, c, g, or t
  misc_feature (1258)..(1258): n is a, c, g, or t
  misc_feature (1264)..(1264): n is a, c, g, or t
  misc_feature (1278)..(1278): n is a, c, g, or t
  misc_feature (1284)..(1284): n is a, c, g, or t
  misc_feature (1295)..(1295): n is a, c, g, or t
  misc_feature (1306)..(1306): n is a, c, g, or t
  misc_feature (1312)..(1312): n is a, c, g, or t
  misc_feature (1316)..(1317): n is a, c, g, or t
  misc_feature (1321)..(1321): n is a, c, g, or t
  misc_feature (1327)..(1327): n is a, c, g, or t
  misc_feature (1348)..(1350): n is a, c, g, or t
  misc_feature (1355)..(1355): n is a, c, g, or t
  misc_feature (1362)..(1362): n is a, c, g, or t
  misc_feature (1364)..(1364): n is a, c, g, or t
aatagagaaattactatgagaggatcgcatcaccatcaccatcacggatcctatttaggtgacactatagaatcgtcgacccacgcgtccgcgccgctccgccgtcgcgtttctctgccggtcgcaatggaagaagagatcgccgcgctggtcattgacaatggctccggcatgtgcaaagctggttttgctggggacgacgctccccgagccgtgtttccttccatcgtcgggcgccccagacaccagggcgtcatggtgggcatgggccagaaggactcctacgtgggcgacgaggcccagagcaagcgtggcatcctgaccctgaagtaccccattgagcatggcatcgtcaccaactgggacgacatggagaagatctggcaccacaccttctacaacgagctgcgcgtggccccggaggagcacccagtgctgctgaccgaggccccccctgaaccccaaggccaacagagagaagatgactcagattatgtttgagaccttcaacaccccggccatgtacgtggccatccaggccgtgctgtccctctacgcctctgggcgcaccactggcattgtcatggactctggagacggggtcacccacacggtgcccatctacgagggctacgccctcccccacgccatcctgcgtctggacctggctggccgggacctgaccgactacctcatgaagatcctcactgagcgaggctacagcttcaccaccacggccgagcgggaaatcgtgcgcgacatcaaggagaagctgtgctacgtcgccctggacttcgagcangagatggccaccgccgcatcctcctcttctctggagaagagctacgagctgcccgatggccaggtcatcaccattggcaatgagcggttccggtgtccggaagcgctgttccagccttccttcctgggtatggaatcttgcggcatccacgaaaaccaccttcaactccatcatgaagtgtgacgtgganatccgcaaanancttgtacnccaacacggnggctgtcggggngggcaccccnatgtacccngggcattgccnanngnatgcaaaaggaaatcnccgccctggcccccaccccatgaaaatnaaaattttcncnccccaaangcaantactcgggggggnatnggnggntcnncntggcctcctntncncttncancaaatngggntnacagcnggattnaaaaaatnggnccccccnttntccccnnaatnttttaaaggaacccnaaaggnaaattttggggggnaaattnaaaaaaatttnccgggaaaganaccctntttnncccnaaaggnaaaaccttaaaaatttttttnnnttttnaaaaccngn

SEQ ID NO: 341 - DNA, 1376 bp, Homo Sapiens
  misc_feature (928)..(928): n is a, c, g, or t
  misc_feature (949)..(949): n is a, c, g, or t
  misc_feature (957)..(957): n is a, c, g, or t
  misc_feature (959)..(959): n is a, c, g, or t
  misc_feature (968)..(968): n is a, c, g, or t
  misc_feature (998)..(998): n is a, c, g, or t
  misc_feature (1011)..(1011): n is a, c, g, or t
  misc_feature (1028)..(1028): n is a, c, g, or t
  misc_feature (1032)..(1032): n is a, c, g, or t
  misc_feature (1039)..(1041): n is a, c, g, or t
  misc_feature (1044)..(1044): n is a, c, g, or t
  misc_feature (1074)..(1074): n is a, c, g, or t
  misc_feature (1081)..(1081): n is a, c, g, or t
  misc_feature (1084)..(1085): n is a, c, g, or t
  misc_feature (1089)..(1089): n is a, c, g, or t
  misc_feature (1104)..(1104): n is a, c, g, or t
  misc_feature (1110)..(1110): n is a, c, g, or t
  misc_feature (1117)..(1117): n is a, c, g, or t
  misc_feature (1164)..(1164): n is a, c, g, or t
  misc_feature (1184)..(1184): n is a, c, g, or t
  misc_feature (1189)..(1191): n is a, c, g, or t
  misc_feature (1193)..(1193): n is a, c, g, or t
  misc_feature (1198)..(1198): n is a, c, g, or t
  misc_feature (1202)..(1202): n is a, c, g, or t
  misc_feature (1207)..(1207): n is a, c, g, or t
  misc_feature (1210)..(1210): n is a, c, g, or t
  misc_feature (1218)..(1219): n is a, c, g, or t
  misc_feature (1224)..(1224): n is a, c, g, or t
  misc_feature (1235)..(1236): n is a, c, g, or t
  misc_feature (1247)..(1248): n is a, c, g, or t
  misc_feature (1251)..(1251): n is a, c, g, or t
  misc_feature (1258)..(1259): n is a, c, g, or t
  misc_feature (1261)..(1261): n is a, c, g, or t
  misc_feature (1265)..(1266): n is a, c, g, or t
  misc_feature (1270)..(1270): n is a, c, g, or t
  misc_feature (1275)..(1276): n is a, c, g, or t
  misc_feature (1280)..(1281): n is a, c, g, or t
  misc_feature (1283)..(1283): n is a, c, g, or t
  misc_feature (1285)..(1285): n is a, c, g, or t
  misc_feature (1288)..(1289): n is a, c, g, or t
  misc_feature (1292)..(1294): n is a, c, g, or t
  misc_feature (1303)..(1304): n is a, c, g, or t
  misc_feature (1308)..(1310): n is a, c, g, or t
  misc_feature (1314)..(1314): n is a, c, g, or t
  misc_feature (1316)..(1318): n is a, c, g, or t
  misc_feature (1329)..(1330): n is a, c, g, or t
  misc_feature (1337)..(1337): n is a, c, g, or t
  misc_feature (1354)..(1357): n is a, c, g, or t
  misc_feature (1362)..(1363): n is a, c, g, or t
  misc_feature (1368)..(1376): n is a, c, g, or t
agagaaattactatgagaggatcgcatcaccatcaccatcacggatcctatttaggtgacactatagaatcgtcgacccacgcgtccgggtggagtggccgtgacgtctgccgccggagggggctccccgccggccacctcctgccccgtggcctgctcctgcagcaaccaggccagccgggtgatctgcacacggagagacctggccgaggtcccagccagcatcccggtcaacacgcggtacctgaacctgcaagagaacggcatccaggtgatccggacggacacgttcaagcacctgcggcacctggagattctgcagctgagcaagaacctggtgcgcaagatcgaggtgggcgccttcaacgggctgcccagcctcaacacgctggagctttttgacaaccggctgaccacggtgcccacgcaggccttcgagtacctgtccaagctgcgggagctctggctgcggaacaaccccatcgagagcatcccctcctacgccttcaaccgcgtgccctcgctgcggcgcctggacctgggcgagctcaagcggctggaatacatctcggaggcggccttcgaggggctggtcaacctgcgctacctcaacctgggcatgtgcaacctcaaggacatccccaacctgacggccctggtgcgcctggaggagctggagctgtcgggcaaccggctggacctgatccgcccgggctccttccagggtctcaccagcctgcgcaagctgtggctcatgcacgcccaggtagccaccatcgagcgcaacgccttcgacgacctcaagtcgctggaggagctcaacctgtcccacaacaacctgatgtcgctgccccacgacctcttcacgcccctgcaccgcctcgagcgcgtgcacctcaaccacaacccctggcattgcaactgcgangtgctctggctgaactggtgnctcaagananggtgcccancaacacgacgtgctgcgcccgctgtatgcncccccggcctcangggggctaattgggganctgnacattcnnnttnactgctatgccccgtctctggaacccccangactcanctnncganggatggtgccaactnaatgcncaagggnactcatgactcgtaattggtaaccaagggacctttgaacaaggtctnacggggggattcctctggtnagggnnntnatttncaanttccnggngaaaggcnnaaatnttgggaaattnnggaaaaccctnnaantaatttnngnaaanngggngggannaaanngngnccnnggnnntttttgggnngggnnntttntnnngggaaaaaaannaaaaggncggggaaaaaaaaaaannnnggggnnggggnnnnnnnnn

SEQ ID NO: 342 - DNA, 1324 bp, Homo Sapiens
  misc_feature (2)..(2): n is a, c, g, or t
  misc_feature (906)..(906): n is a, c, g, or t
  misc_feature (967)..(967): n is a, c, g, or t
  misc_feature (981)..(982): n is a, c, g, or t
  misc_feature (995)..(995): n is a, c, g, or t
  misc_feature (1002)..(1002): n is a, c, g, or t
  misc_feature (1004)..(1004): n is a, c, g, or t
  misc_feature (1008)..(1008): n is a, c, g, or t
  misc_feature (1032)..(1032): n is a, c, g, or t
  misc_feature (1047)..(1047): n is a, c, g, or t
  misc_feature (1055)..(1058): n is a, c, g, or t
  misc_feature (1060)..(1073): n is a, c, g, or t
  misc_feature (1075)..(1076): n is a, c, g, or t
  misc_feature (1078)..(1082): n is a, c, g, or t
  misc_feature (1084)..(1090): n is a, c, g, or t
  misc_feature (1103)..(1103): n is a, c, g, or t
  misc_feature (1113)..(1113): n is a, c, g, or t
  misc_feature (1115)..(1115): n is a, c, g, or t
  misc_feature (1118)..(1118): n is a, c, g, or t
  misc_feature (1123)..(1123): n is a, c, g, or t
  misc_feature (1131)..(1131): n is a, c, g, or t
  misc_feature (1143)..(1143): n is a, c, g, or t
  misc_feature (1154)..(1154): n is a, c, g, or t
  misc_feature (1160)..(1160): n is a, c, g, or t
  misc_feature (1165)..(1165): n is a, c, g, or t
  misc_feature (1174)..(1174): n is a, c, g, or t
  misc_feature (1177)..(1178): n is a, c, g, or t
  misc_feature (1189)..(1189): n is a, c, g, or t
  misc_feature (1195)..(1195): n is a, c, g, or t
  misc_feature (1198)..(1198): n is a, c, g, or t
  misc_feature (1201)..(1201): n is a, c, g, or t
  misc_feature (1210)..(1210): n is a, c, g, or t
  misc_feature (1226)..(1226): n is a, c, g, or t
  misc_feature (1248)..(1248): n is a, c, g, or t
  misc_feature (1265)..(1265): n is a, c, g, or t
  misc_feature (1270)..(1271): n is a, c, g, or t
  misc_feature (1290)..(1291): n is a, c, g, or t
  misc_feature (1293)..(1296): n is a, c, g, or t
  misc_feature (1300)..(1301): n is a, c, g, or t
  misc_feature (1303)..(1304): n is a, c, g, or t
  misc_feature (1311)..(1311): n is a, c, g, or t
  misc_feature (1324)..(1324): n is a, c, g, or t
anattagagaaaattaactatgagaggatcgcatcaccatcaccatcacggatcctatttaggtgacactatagaatcgtcgacccacgcgtccgcccacgcgtccggccaactctcgcactctgttcttccgccgctccgccgtcgcgtttctctgccggtcgcaatggaagaagagatcgccgcgctggtcattgacaatggctccggcatgtgcaaagctggttttgctggggacgacgctccccgagccgtgtttccttccatcgtcgggcgccccagacaccagggcgtcatggtgggcatgggccagaaggactcctacgtgggcgacgaggcccagagcaagcgtggcatcctgaccctgaagtaccccatcctggcctcactgtccaccttccagcagatgtggattagcaagcaggagtacgacgagtcgggcccctccatcgtccaccgcaaatgcttctaaacggactcagcagatgcgtagcatttgctgcatgggttaattgagaatagaaatttgcccctggcaaatgcacacacctcatgctagcctcacgaaactggaataagccttcgaaaagaaattgtccttgaagcttgtatctgatatcagcactggattgtagaacttgttgctgattttgaccttgtattgaagttaactgttccccttggtattaacgtgtcagggctgagtgttctgggatttctctagaggctggcaagaaccagttgttttgtcttgcgggtctgtcagggttggaaaagtccaagccgtaggacccagtttcctttcttagctgatgtctttggccagaacaccgtgggctgttacttgctttgagttggaagcggtttgcatttacgcctgtaaatgtattcattcttaatttatgnaaaggttttttttgtacgcaatttctcgattctttgaaaaaaatgaacaacaaattttggntttctaactggtanngtgaaaacattanggccccnancaanacgtcattgtgtaaaggaaaaaanaaaaagtgcttgccngtaccccnnnnannnnnnnnnnnnnnannannnnnannnnnnngggggggggcccnccccccaaananggnagccnaaattaancttaatttaacntgaaacttggnaacccngtttngaaaaaatnccnnaaagaaccccnaaaacnccnttntggaatttntttaaaaaaccttggnttgccccccgggggtttttttnttgggggaaaaaccaancaaanntgggggaaattttttgganncnnnngaanntnnaaggggnaaaaaaattcctn

SEQ ID NO: 343 - DNA, 1444 bp, Homo Sapiens
  misc_feature (852)..(852): n is a, c, g, or t
  misc_feature (883)..(883): n is a, c, g, or t
  misc_feature (885)..(885): n is a, c, g, or t
  misc_feature (928)..(928): n is a, c, g, or t
  misc_feature (941)..(941): n is a, c, g, or t
  misc_feature (946)..(946): n is a, c, g, or t
  misc_feature (979)..(979): n is a, c, g, or t
  misc_feature (983)..(983): n is a, c, g, or t
  misc_feature (992)..(993): n is a, c, g, or t
  misc_feature (995)..(995): n is a, c, g, or t
  misc_feature (1004)..(1004): n is a, c, g, or t
  misc_feature (1014)..(1014): n is a, c, g, or t
  misc_feature (1056)..(1056): n is a, c, g, or t
  misc_feature (1060)..(1062): n is a, c, g, or t
  misc_feature (1065)..(1065): n is a, c, g, or t
  misc_feature (1067)..(1067): n is a, c, g, or t
  misc_feature (1074)..(1074): n is a, c, g, or t
  misc_feature (1076)..(1076): n is a, c, g, or t
  misc_feature (1078)..(1078): n is a, c, g, or t
  misc_feature (1082)..(1082): n is a, c, g, or t
  misc_feature (1092)..(1092): n is a, c, g, or t
  misc_feature (1097)..(1097): n is a, c, g, or t
  misc_feature (1104)..(1104): n is a, c, g, or t
  misc_feature (1116)..(1116): n is a, c, g, or t
  misc_feature (1118)..(1118): n is a, c, g, or t
  misc_feature (1124)..(1124): n is a, c, g, or t
  misc_feature (1139)..(1139): n is a, c, g, or t
  misc_feature (1143)..(1143): n is a, c, g, or t
  misc_feature (1159)..(1159): n is a, c, g, or t
  misc_feature (1162)..(1163): n is a, c, g, or t
  misc_feature (1185)..(1186): n is a, c, g, or t
  misc_feature (1197)..(1197): n is a, c, g, or t
  misc_feature (1213)..(1214): n is a, c, g, or t
  misc_feature (1224)..(1224): n is a, c, g, or t
  misc_feature (1226)..(1226): n is a, c, g, or t
  misc_feature (1239)..(1239): n is a, c, g, or t
  misc_feature (1250)..(1250): n is a, c, g, or t
  misc_feature (1265)..(1265): n is a, c, g, or t
  misc_feature (1268)..(1268): n is a, c, g, or t
  misc_feature (1274)..(1275): n is a, c, g, or t
  misc_feature (1286)..(1287): n is a, c, g, or t
  misc_feature (1320)..(1320): n is a, c, g, or t
  misc_feature (1346)..(1346): n is a, c, g, or t
  misc_feature (1350)..(1350): n is a, c, g, or t
  misc_feature (1353)..(1353): n is a, c, g, or t
  misc_feature (1365)..(1367): n is a, c, g, or t
  misc_feature (1370)..(1371): n is a, c, g, or t
  misc_feature (1373)..(1373): n is a, c, g, or t
  misc_feature (1375)..(1376): n is a, c, g, or t
  misc_feature (1380)..(1380): n is a, c, g, or t
  misc_feature (1388)..(1388): n is a, c, g, or t
  misc_feature (1390)..(1390): n is a, c, g, or t
  misc_feature (1393)..(1393): n is a, c, g, or t
  misc_feature (1399)..(1399): n is a, c, g, or t
  misc_feature (1417)..(1417): n is a, c, g, or t
agagattactatgagaggatcgcatcaccatcaccatcacggatcctatttaggtgacactatagaatcgtcgacccacgcgtccgcccacgcgtccgcccacgcgtccggccaactctcgcactctgttcttccgccgctccgccgtcgcgtttctctgccggtcgcaatggaagaagagatcgccgcgctggtcattgacaatggctccggcatgtgcaaagctggttttgctggggacgacgctccccgagccgtgtttccttccatcgtcgggcgccccagacaccagggcgtcatggtgggcatgggccagaaggactcctacgtgggcgacgaggcccagagcaagcgtggcatcctgaccctgaagtaccccattgagcatggcatcgtcaccaactgggacgacatggagaagatctggcaccacaccttctacaacgagctgcgcgtggccccggaggagcacccagtgctgctgaccgaggcccccctgaaccccaaggccaacagagagaagatgactcagattatgtttgagaccttcaacaccccggccatgtacgtggccatccaggccgtgctgtccctctacgcctctgggcgcaccactggcattgtcatggactctggagacggggtcacccacacggtgcccatctacgagggctacgccctcccccacgccatcctgcgtctggacctggctggccgggacctgaccgactacctcatgaagatcctcactgagcgaggctacagcttcaccaccacggccgagcgggaaatcgtgcgcgacatcaaggagaagctgtgctacgtcgccctggacttcgagcaggagatggncaccgccgcatcctcctcttctctggagaananctacgagctgcccgatggccagttcatcaccattggcaatgancggttccgtgtcngaggngctgttccagccttccttcctgggtatggaatnttgnggcatccannanaccaccttnaatttccatnatgaaagtgggacgtggaaatccccaaaaactgtaccccaanaggnnnttntncgggggncncncatntatccgggcnttccnaaagatncaaaaagaaaancncccccntgggcccccaacatnaaantaaaattttccccccnaanncaatatcggggggattgggggnnctttggcctcnggtccccttccccaannggtttacaancngattaaaaatggnccccttcctcnccaaagtttttaaanaancaaaanngaaaatttggnngttataaaaaatttccggaaaacccccttgttncccaaaggaaaacctaaaaaattttntttntanaaccggtaaatnnnttnncntnnaaancccctaananggnggtttnttttaagaaaaatttttngggagaaaaaatttttttttaagggtt

SEQ ID NO: 344 - DNA, 1504 bp, Homo Sapiens
  misc_feature (25)..(25): n is a, c, g, or t
  misc_feature (119)..(119): n is a, c, g, or t
  misc_feature (349)..(349): n is a, c, g, or t
  misc_feature (427)..(427): n is a, c, g, or t
  misc_feature (531)..(531): n is a, c, g, or t
  misc_feature (553)..(553): n is a, c, g, or t
  misc_feature (560)..(560): n is a, c, g, or t
  misc_feature (575)..(575): n is a, c, g, or t
  misc_feature (585)..(585): n is a, c, g, or t
  misc_feature (596)..(596): n is a, c, g, or t
  misc_feature (617)..(617): n is a, c, g, or t
  misc_feature (645)..(645): n is a, c, g, or t
  misc_feature (660)..(660): n is a, c, g, or t
  misc_feature (670)..(670): n is a, c, g, or t
  misc_feature (683)..(683): n is a, c, g, or t
  misc_feature (692)..(692): n is a, c, g, or t
  misc_feature (712)..(712): n is a, c, g, or t
  misc_feature (748)..(748): n is a, c, g, or t
  misc_feature (753)..(753): n is a, c, g, or t
  misc_feature (755)..(755): n is a, c, g, or t
  misc_feature (769)..(769): n is a, c, g, or t
  misc_feature (776)..(776): n is a, c, g, or t
  misc_feature (779)..(779): n is a, c, g, or t
  misc_feature (789)..(789): n is a, c, g, or t
  misc_feature (812)..(812): n is a, c, g, or t
  misc_feature (814)..(814): n is a, c, g, or t
  misc_feature (818)..(818): n is a, c, g, or t
  misc_feature (824)..(824): n is a, c, g, or t
  misc_feature (826)..(826): n is a, c, g, or t
  misc_feature (829)..(829): n is a, c, g, or t
  misc_feature (841)..(841): n is a, c, g, or t
  misc_feature (843)..(843): n is a, c, g, or t
  misc_feature (852)..(852): n is a, c, g, or t
  misc_feature (857)..(857): n is a, c, g, or t
  misc_feature (867)..(867): n is a, c, g, or t
  misc_feature (871)..(871): n is a, c, g, or t
  misc_feature (873)..(873): n is a, c, g, or t
  misc_feature (875)..(876): n is a, c, g, or t
  misc_feature (882)..(882): n is a, c, g, or t
  misc_feature (886)..(886): n is a, c, g, or t
  misc_feature (902)..(902): n is a, c, g, or t
  misc_feature (908)..(908): n is a, c, g, or t
  misc_feature (910)..(910): n is a, c, g, or t
  misc_feature (913)..(913): n is a, c, g, or t
  misc_feature (915)..(915): n is a, c, g, or t
  misc_feature (918)..(918): n is a, c, g, or t
  misc_feature (922)..(922): n is a, c, g, or t
  misc_feature (924)..(924): n is a, c, g, or t
  misc_feature (930)..(930): n is a, c, g, or t
  misc_feature (949)..(949): n is a, c, g, or t
  misc_feature (951)..(952): n is a, c, g, or t
  misc_feature (956)..(956): n is a, c, g, or t
  misc_feature (960)..(960): n is a, c, g, or t
  misc_feature (968)..(968): n is a, c, g, or t
  misc_feature (970)..(971): n is a, c, g, or t
  misc_feature (975)..(976): n is a, c, g, or t
  misc_feature (979)..(979): n is a, c, g, or t
  misc_feature (985)..(985): n is a, c, g, or t
  misc_feature (988)..(988): n is a, c, g, or t
  misc_feature (990)..(990): n is a, c, g, or t
  misc_feature (994)..(994): n is a, c, g, or t
  misc_feature (1002)..(1002): n is a, c, g, or t
  misc_feature (1004)..(1005): n is a, c, g, or t
  misc_feature (1007)..(1008): n is a, c, g, or t
  misc_feature (1011)..(1011): n is a, c, g, or t
  misc_feature (1015)..(1015): n is a, c, g, or t
  misc_feature (1018)..(1019): n is a, c, g, or t
  misc_feature (1033)..(1033): n is a, c, g, or t
  misc_feature (1037)..(1038): n is a, c, g, or t
  misc_feature (1043)..(1043): n is a, c, g, or t
  misc_feature (1053)..(1053): n is a, c, g, or t
  misc_feature (1059)..(1059): n is a, c, g, or t
  misc_feature (1061)..(1062): n is a, c, g, or t
  misc_feature (1066)..(1067): n is a, c, g, or t
  misc_feature (1070)..(1071): n is a, c, g, or t
  misc_feature (1073)..(1073): n is a, c, g, or t
  misc_feature (1084)..(1085): n is a, c, g, or t
  misc_feature (1087)..(1088): n is a, c, g, or t
  misc_feature (1094)..(1095): n is a, c, g, or t
  misc_feature (1097)..(1097): n is a, c, g, or t
  misc_feature (1103)..(1103): n is a, c, g, or t
  misc_feature (1106)..(1106): n is a, c, g, or t
  misc_feature (1117)..(1117): n is a, c, g, or t
  misc_feature (1132)..(1132): n is a, c, g, or t
  misc_feature (1135)..(1135): n is a, c, g, or t
  misc_feature (1141)..(1142): n is a, c, g, or t
  misc_feature (1146)..(1146): n is a, c, g, or t
  misc_feature (1151)..(1151): n is a, c, g, or t
  misc_feature (1157)..(1158): n is a, c, g, or t
  misc_feature (1164)..(1164): n is a, c, g, or t
  misc_feature (1176)..(1176): n is a, c, g, or t
  misc_feature (1179)..(1180): n is a, c, g, or t
  misc_feature (1188)..(1191): n is a, c, g, or t
  misc_feature (1197)..(1197): n is a, c, g, or t
  misc_feature (1205)..(1206): n is a, c, g, or t
  misc_feature (1212)..(1212): n is a, c, g, or t
  misc_feature (1214)..(1214): n is a, c, g, or t
  misc_feature (1216)..(1216): n is a, c, g, or t
  misc_feature (1224)..(1226): n is a, c, g, or t
  misc_feature (1228)..(1229): n is a, c, g, or t
  misc_feature (1232)..(1232): n is a, c, g, or t
  misc_feature (1237)..(1237): n is a, c, g, or t
  misc_feature (1241)..(1241): n is a, c, g, or t
  misc_feature (1244)..(1244): n is a, c, g, or t
  misc_feature (1253)..(1254): n is a, c, g, or t
  misc_feature (1257)..(1257): n is a, c, g, or t
  misc_feature (1271)..(1271): n is a, c, g, or t
  misc_feature (1274)..(1275): n is a, c, g, or t
  misc_feature (1277)..(1277): n is a, c, g, or t
  misc_feature (1281)..(1282): n is a, c, g, or t
  misc_feature (1288)..(1288): n is a, c, g, or t
  misc_feature (1290)..(1291): n is a, c, g, or t
  misc_feature (1302)..(1302): n is a, c, g, or t
  misc_feature (1305)..(1305): n is a, c, g, or t
  misc_feature (1320)..(1320): n is a, c, g, or t
  misc_feature (1326)..(1326): n is a, c, g, or t
  misc_feature (1328)..(1328): n is a, c, g, or t
  misc_feature (1333)..(1333): n is a, c, g, or t
  misc_feature (1341)..(1341): n is a, c, g, or t
  misc_feature (1343)..(1345): n is a, c, g, or t
  misc_feature (1350)..(1351): n is a, c, g, or t
  misc_feature (1353)..(1353): n is a, c, g, or t
  misc_feature (1363)..(1365): n is a, c, g, or t
  misc_feature (1374)..(1374): n is a, c, g, or t
  misc_feature (1376)..(1376): n is a, c, g, or t
  misc_feature (1378)..(1379): n is a, c, g, or t
  misc_feature (1382)..(1382): n is a, c, g, or t
  misc_feature (1384)..(1384): n is a, c, g, or t
  misc_feature (1388)..(1388): n is a, c, g, or t
  misc_feature (1393)..(1394): n is a, c, g, or t
  misc_feature (1411)..(1411): n is a, c, g, or t
  misc_feature (1413)..(1413): n is a, c, g, or t
  misc_feature (1418)..(1419): n is a, c, g, or t
  misc_feature (1421)..(1423): n is a, c, g, or t
  misc_feature (1425)..(1427): n is a, c, g, or t
  misc_feature (1433)..(1433): n is a, c, g, or t
  misc_feature (1436)..(1436): n is a, c, g, or t
  misc_feature (1439)..(1439): n is a, c, g, or t
  misc_feature (1446)..(1446): n is a, c, g, or t
  misc_feature (1448)..(1448): n is a, c, g, or t
  misc_feature (1452)..(1453): n is a, c, g, or t
  misc_feature (1456)..(1456): n is a, c, g, or t
  misc_feature (1465)..(1465): n is a, c, g, or t
  misc_feature (1470)..(1470): n is a, c, g, or t
  misc_feature (1484)..(1484): n is a, c, g, or t
  misc_feature (1491)..(1492): n is a, c, g, or t
  misc_feature (1495)..(1495): n is a, c, g, or t
  misc_feature (1501)..(1503): n is a, c, g, or t
gagagaatactatgagaggatcgcntcaccatcaccatcacggatcctatttaggtgacactatagaatcgtcgacccacgcgtccggaaagagggtcccagggctgcaaaactggaancacagcctcggggatggggagggaaagacggtgctatatccagttcctgctctctgctcatgggtggctgtgacaaccctggcctcacttgattcatctctggttttcttgccaccctctgggagtccccatcccattttcatcctgagcccaaccaggccctgccattggcctcttgtcccttggcacacttgtacccacaggtgaggggcaggacctgaaggtattgncctgttcaacaatcagtcatcatgggtgtttttgtcaactgcttgttaattgatttggggatgtttgccccgaatganaggttgaggaaaagactgtgggtggggaggccctgcctgacccatcccttttcctttctggccccagcctaggtggaggcaagtggaatatcttatattgggcnatttgggggctcggggaggcanaaaatcncttgggagtcttggntggcgctggngcattctgttncctcttgatctcaaagcacantgtggatttggggaccaaaggtcagggnacacatcccccttanaggacctganttttgtgacagtnggtagagtngtaaggtacgagcatcaaanaagcagcctgttttccctcagcttaattcctccttncccananaaggcaagcccagnacatggnaanctttgcagcngggccctcccctcaactcttccngncccnaaaaananggnccgtttttcttncnaccccccanaaganaagaaggcanctgncncnnctgctngctnaataaaccgggggctnactggntncantntancttnancaaaancatcccatcccctaaaaanannaaanaaanccctaaangnnctgnnctngggatngancntaancccctttntnntnntcnaaanatnnccagaaggcttttnaacnncattnaaccccaggnaaaaangnnctcnnganntnaaaagggaaannannttttgnngnaccccntcnaaaaaataacnacaaccccccgcggntanaatagnntgtntcccnccaacnngcactngttttctccccntannccctccgnnnnaaaaangttattgnnaatatnangntttccccnnncnnagnaaatntggntcnttttttaanntgngcaaaaaaataaanccnncnactnnatttanannaatcaaagccnacnaatattcttatcacnatctancnacatnattatacntnnnaaagnnancacccacccnnntatagaganancnncananaggngcatnnccccctacggttgtggncnactcnncnnngnnnattaanatnctncaccacntntctnngcncaaacaatnataanaaaaaaacaacagnctccatnncancattannng

SEQ ID NO: 345 - DNA, 1400 bp, Homo Sapiens
  misc_feature (935)..(935): n is a, c, g, or t
  misc_feature (968)..(968): n is a, c, g, or t
  misc_feature (976)..(976): n is a, c, g, or t
  misc_feature (999)..(999): n is a, c, g, or t
  misc_feature (1018)..(1018): n is a, c, g, or t
  misc_feature (1023)..(1023): n is a, c, g, or t
  misc_feature (1038)..(1038): n is a, c, g, or t
  misc_feature (1042)..(1042): n is a, c, g, or t
  misc_feature (1058)..(1058): n is a, c, g, or t
  misc_feature (1067)..(1067): n is a, c, g, or t
  misc_feature (1077)..(1078): n is a, c, g, or t
  misc_feature (1086)..(1086): n is a, c, g, or t
  misc_feature (1126)..(1126): n is a, c, g, or t
  misc_feature (1133)..(1133): n is a, c, g, or t
  misc_feature (1157)..(1157): n is a, c, g, or t
  misc_feature (1161)..(1161): n is a, c, g, or t
  misc_feature (1165)..(1165): n is a, c, g, or t
  misc_feature (1172)..(1172): n is a, c, g, or t
  misc_feature (1175)..(1175): n is a, c, g, or t
  misc_feature (1188)..(1188): n is a, c, g, or t
  misc_feature (1204)..(1204): n is a, c, g, or t
  misc_feature (1210)..(1210): n is a, c, g, or t
  misc_feature (1214)..(1214): n is a, c, g, or t
  misc_feature (1216)..(1216): n is a, c, g, or t
  misc_feature (1218)..(1218): n is a, c, g, or t
  misc_feature (1221)..(1221): n is a, c, g, or t
  misc_feature (1232)..(1232): n is a, c, g, or t
  misc_feature (1240)..(1240): n is a, c, g, or t
  misc_feature (1246)..(1246): n is a, c, g, or t
  misc_feature (1249)..(1249): n is a, c, g, or t
  misc_feature (1253)..(1254): n is a, c, g, or t
  misc_feature (1256)..(1256): n is a, c, g, or t
  misc_feature (1258)..(1258): n is a, c, g, or t
  misc_feature (1260)..(1260): n is a, c, g, or t
  misc_feature (1263)..(1263): n is a, c, g, or t
  misc_feature (1266)..(1266): n is a, c, g, or t
  misc_feature (1271)..(1271): n is a, c, g, or t
  misc_feature (1307)..(1307): n is a, c, g, or t
  misc_feature (1327)..(1327): n is a, c, g, or t
  misc_feature (1329)..(1329): n is a, c, g, or t
  misc_feature (1334)..(1334): n is a, c, g, or t
  misc_feature (1340)..(1340): n is a, c, g, or t
  misc_feature (1345)..(1345): n is a, c, g, or t
  misc_feature (1348)..(1348): n is a, c, g, or t
  misc_feature (1367)..(1367): n is a, c, g, or t
  misc_feature (1383)..(1385): n is a, c, g, or t
  misc_feature (1397)..(1397): n is a, c, g, or t
  misc_feature (1400)..(1400): n is a, c, g, or t
ctatagagaaattactatgagaggatcgcatcaccatcaccatcacggatcctatttaggtgacactatagaatcgtcgacccacgcgtccgctggagagaaaccctatgagtgtaagcaatgtgggaaagccttcacatctgcctcacaccttcaaatgcatgaaaggactcacactggaaagcaactgtatgaatctaaacaatgtgaaaaaacctttggatctgtcagaaaccttcaaattcatgaaaagacacaccctggagagaaaccctataaggaatatggaaaagcattcaacaatttctcttcctttcaaatacatgcaacaatgcacagaggacagaatgcctatgaatgtaaagagtgtgacaaagcattcatatctgccaagatccttcgagtacatgcaagaacacaccctggagagaaaccctatgaatgtaaggaatgcggaaaagcgttcaattatttttcttctttgcgtatacacaaaaggatgcacactggagagaaaccatatgaatgtaaggattgtgggaaagcattcagtttgcctggttcctttcgtagacataaaagggctcacactggagtgaaaccgtatgaatgcaaggaatgtggcaaagccttcacttcttctggttcctttcagtgtcataaaaggattcacactggagagaaaccctatgagtgtaagcagtgtggtaaagccttcatttcttccactgccattcgtagacatgaaaggactcacactggagagaaaccctatgagtgtaagcaatgtggaaaagcctttatttctttcagttccattcagtaccatgaaaggactcacactggagagaaacagtatgagtgtaagcagtgtggtaaagccttcatgtcttctactgcatttcagtatcatgaaaagacccacaccggagagnaacactatgaatgtaagcagtgtgggaaagccntcatttcntccagtagccttcgatatcatgnaaaggactcccactggganaaaanccctatgaatgtaancagngtggtaaagccttccnaatctgccnctccacttcnnatgcatanaagattcccctggggaaaaaccctatgaatgtaaccatgngggaaancctacaaattgtcccccaacttcngggnctgnaaggacnccnctggaaacacccnttgaataaaaccaaangggaancctncnanttnctaaaaccctncaatccgncagggnggnaacnntnangnttntgnccccncaaaaaaaaaaaaaaaaaaaaaaaaaaaaaaagggngcccccccaaggggccaaancnttttncgaccngcccnggnaaaccaaaaccccaccccnggttttcacccggccnnntttttgaaaccnccn

SEQ ID NO: 346 - DNA, 1325 bp, Homo Sapiens
  misc_feature (950)..(950): n is a, c, g, or t
  misc_feature (953)..(953): n is a, c, g, or t
  misc_feature (977)..(977): n is a, c, g, or t
  misc_feature (995)..(995): n is a, c, g, or t
  misc_feature (1005)..(1005): n is a, c, g, or t
  misc_feature (1016)..(1016): n is a, c, g, or t
  misc_feature (1043)..(1043): n is a, c, g, or t
  misc_feature (1046)..(1046): n is a, c, g, or t
  misc_feature (1049)..(1049): n is a, c, g, or t
  misc_feature (1053)..(1053): n is a, c, g, or t
  misc_feature (1066)..(1066): n is a, c, g, or t
  misc_feature (1073)..(1073): n is a, c, g, or t
  misc_feature (1079)..(1079): n is a, c, g, or t
  misc_feature (1090)..(1090): n is a, c, g, or t
  misc_feature (1105)..(1105): n is a, c, g, or t
  misc_feature (1118)..(1118): n is a, c, g, or t
  misc_feature (1125)..(1125): n is a, c, g, or t
  misc_feature (1144)..(1144): n is a, c, g, or t
  misc_feature (1151)..(1151): n is a, c, g, or t
  misc_feature (1164)..(1164): n is a, c, g, or t
  misc_feature (1167)..(1167): n is a, c, g, or t
  misc_feature (1202)..(1202): n is a, c, g, or t
  misc_feature (1206)..(1206): n is a, c, g, or t
  misc_feature (1212)..(1212): n is a, c, g, or t
  misc_feature (1215)..(1215): n is a, c, g, or t
  misc_feature (1217)..(1217): n is a, c, g, or t
  misc_feature (1219)..(1219): n is a, c, g, or t
  misc_feature (1223)..(1223): n is a, c, g, or t
  misc_feature (1225)..(1225): n is a, c, g, or t
  misc_feature (1234)..(1234): n is a, c, g, or t
  misc_feature (1237)..(1237): n is a, c, g, or t
  misc_feature (1240)..(1240): n is a, c, g, or t
  misc_feature (1242)..(1242): n is a, c, g, or t
  misc_feature (1245)..(1246): n is a, c, g, or t
  misc_feature (1261)..(1261): n is a, c, g, or t
  misc_feature (1273)..(1273): n is a, c, g, or t
  misc_feature (1276)..(1278): n is a, c, g, or t
  misc_feature (1282)..(1282): n is a, c, g, or t
  misc_feature (1285)..(1285): n is a, c, g, or t
  misc_feature (1290)..(1290): n is a, c, g, or t
  misc_feature (1299)..(1300): n is a, c, g, or t
  misc_feature (1305)..(1306): n is a, c, g, or t
  misc_feature (1308)..(1308): n is a, c, g, or t
  misc_feature (1312)..(1312): n is a, c, g, or t
  misc_feature (1318)..(1318): n is a, c, g, or t
  misc_feature (1320)..(1320): n is a, c, g, or t
  misc_feature (1325)..(1325): n is a, c, g, or t
atagagaaattactatgagaggatcgcatcaccatcaccatcacggatcctatttaggtgacactatagaatcgtcgacccacgcgtccgcggacgcgtgggcggcgggagctcggcggagggcgggccaggtgactggtccgggccatgccgaggaagaagccattcagcgtgaagcagaagaagaagcagttgcaggacaaacgggagcggaagagagggcttcaagatgggctgcgctccagttccaacagccgcagcgggagccgggagcggcgagaggaacagaccgacacctcggacggggagtctgtgacccatcatatccgcaggcttaaccagcagccttctcaggggctgggtccacgaggctacgacccaaatcgataccgactgcattttgagagagacagcagggaggaggtagagaggagaaagagagcagcccgggagcaagttctacagccggtcagtgctgagttgttggagctggacatccgggaggtgtatcagcctggctcagttctggactttcctcgacgtcctccttggagctatgagatgtccaaggagcaactaatgagccaagaggaacggagcttccaagactatcttgggaagattcatggggcttactcctctgagaaactcagctactttgagcacaatctggagacatggaggcagctgtggcgggtgttagagatgtctgacatcgtcctgcttatcactgatatccgacatccagttgtgaatttcccgccagcactttatgagtatgtgactggagaacttggactggccctggtgctggttttgaacaaggtggatctggccccgccagctcttgtggttgcctggaagcattatttccatcaacactatccccagctccacgtcgtccttttcacctcttttcctcgggacccccgcaccccacaggaccctantantgtcttgaaaaaaaatccgaagcnggggaaaagatggactcnggccctgggnccaaaacattnctgaaacctgtgaaccctcctgtgggnaantgnattnaacacctggcggnaaaaatnctcggnattggctgggncccctggggtatggntttgggaaaaaanaaaaaanatgcccccatctggggacnccaatgntcccatggaccantgncccccaaacctaaaggggggggaccccccggtggnttcnatgggnaancncnttantnggttggggnaanttngnttnnaaccggccaccaaanttaaaatttttnccnnngggnggngcccnccctttccnnttttnngngggntggggnanccccn

SEQ ID NO: 347 - DNA, 1369 bp, Homo Sapiens
  misc_feature (732)..(732): n is a, c, g, or t
  misc_feature (765)..(765): n is a, c, g, or t
  misc_feature (796)..(796): n is a, c, g, or t
  misc_feature (813)..(813): n is a, c, g, or t
  misc_feature (859)..(859): n is a, c, g, or t
  misc_feature (861)..(861): n is a, c, g, or t
  misc_feature (881)..(881): n is a, c, g, or t
  misc_feature (890)..(890): n is a, c, g, or t
  misc_feature (895)..(895): n is a, c, g, or t
  misc_feature (929)..(929): n is a, c, g, or t
  misc_feature (934)..(934): n is a, c, g, or t
  misc_feature (936)..(936): n is a, c, g, or t
  misc_feature (938)..(938): n is a, c, g, or t
  misc_feature (950)..(951): n is a, c, g, or t
  misc_feature (953)..(953): n is a, c, g, or t
  misc_feature (963)..(963): n is a, c, g, or t
  misc_feature (968)..(968): n is a, c, g, or t
  misc_feature (971)..(971): n is a, c, g, or t
  misc_feature (973)..(973): n is a, c, g, or t
  misc_feature (976)..(976): n is a, c, g, or t
  misc_feature (995)..(995): n is a, c, g, or t
  misc_feature (998)..(998): n is a, c, g, or t
  misc_feature (1000)..(1000): n is a, c, g, or t
  misc_feature (1004)..(1004): n is a, c, g, or t
  misc_feature (1007)..(1008): n is a, c, g, or t
  misc_feature (1012)..(1012): n is a, c, g, or t
  misc_feature (1015)..(1015): n is a, c, g, or t
  misc_feature (1017)..(1017): n is a, c, g, or t
  misc_feature (1030)..(1030): n is a, c, g, or t
  misc_feature (1037)..(1038): n is a, c, g, or t
  misc_feature (1040)..(1040): n is a, c, g, or t
  misc_feature (1044)..(1044): n is a, c, g, or t
  misc_feature (1048)..(1048): n is a, c, g, or t
  misc_feature (1054)..(1054): n is a, c, g, or t
  misc_feature (1056)..(1060): n is a, c, g, or t
  misc_feature (1068)..(1068): n is a, c, g, or t
  misc_feature (1075)..(1075): n is a, c, g, or t
  misc_feature (1077)..(1077): n is a, c, g, or t
  misc_feature (1083)..(1084): n is a, c, g, or t
  misc_feature (1091)..(1092): n is a, c, g, or t
  misc_feature (1100)..(1100): n is a, c, g, or t
  misc_feature (1106)..(1106): n is a, c, g, or t
  misc_feature (1111)..(1111): n is a, c, g, or t
  misc_feature (1115)..(1115): n is a, c, g, or t
  misc_feature (1117)..(1117): n is a, c, g, or t
  misc_feature (1121)..(1121): n is a, c, g, or t
  misc_feature (1128)..(1128): n is a, c, g, or t
  misc_feature (1138)..(1138): n is a, c, g, or t
  misc_feature (1140)..(1140): n is a, c, g, or t
  misc_feature (1144)..(1146): n is a, c, g, or t
  misc_feature (1148)..(1150): n is a, c, g, or t
  misc_feature (1164)..(1164): n is a, c, g, or t
  misc_feature (1169)..(1169): n is a, c, g, or t
  misc_feature (1171)..(1171): n is a, c, g, or t
  misc_feature (1178)..(1178): n is a, c, g, or t
  misc_feature (1180)..(1185): n is a, c, g, or t
  misc_feature (1188)..(1188): n is a, c, g, or t
  misc_feature (1191)..(1192): n is a, c, g, or t
  misc_feature (1195)..(1200): n is a, c, g, or t
  misc_feature (1208)..(1208): n is a, c, g, or t
  misc_feature (1211)..(1211): n is a, c, g, or t
  misc_feature (1218)..(1219): n is a, c, g, or t
  misc_feature (1223)..(1227): n is a, c, g, or t
  misc_feature (1230)..(1230): n is a, c, g, or t
  misc_feature (1236)..(1239): n is a, c, g, or t
  misc_feature (1241)..(1245): n is a, c, g, or t
  misc_feature (1247)..(1249): n is a, c, g, or t
  misc_feature (1259)..(1259): n is a, c, g, or t
  misc_feature (1272)..(1274): n is a, c, g, or t
  misc_feature (1280)..(1350): n is a, c, g, or t
  misc_feature (1352)..(1362): n is a, c, g, or t
  misc_feature (1364)..(1369): n is a, c, g, or t
tatagagaaattactatgagaggatcgcatcaccatcaccatcacggatcctatttaggtgacactatagaatcgtcgacccacgcgatccgcccacgcgtccggaaggggcctcccttgtgggacccgtggggggctctgttttccatccagtcttcctttcccagcccccaactcccaagacagacagtgtggagcccagcggcggcggagcaggcccgggcctgagcaggcaggcgctgctagcaagacttgatctttgtggccagctgtgccagggggctggcggggctgaggggtgcgggcagctttcatcccaggggctccactgggccccgtcaccctcctgtcgcgtcccctgcgtcccacctccctcctgcccggcagtcccgcccgtgcccccagcctggcgaggaagccgtccaacagtagccccagggccagctcccaacagaaagggctgacgtggctccaggactcaggggcgctccatgggaggacgaaggaagcccagccagccaggagccactcctcacacctccaagtgtggccaagtgggccctgaggccaaggacttacttgctcttcctggccatctctccctttctggaggaggccgggggcctgtgtacaccaaggctgacctcgtgctgcctgctgggacccagccctccctgccgctcccctgtgagcccagtccaccgtgggcgcccagggccagggacgggccancgcccggctgcatcgcgaggttgggagtcacantggctgtgggcctggacgggcacagccagancaggggcccatgggaanggcaagggatggggaagcctgggccggccccttccctgctcccaananaggtgtccaggtggcgggancacaccaangaaanccagcttacccggtgggaaaacaggacaaaacangtggnangnagaaaccctggnnangcaggaacantgaantangnaancacaaaaataaaggctccnaangnggcntcnntgtntcntnaatgtcaaaattnaaaaaanncntcantttntattanannnnntattgaanggaattntncttttnnaatcccnntgaaaaancccaanccttnctcngntttntctttgnaaaaaccccngncccnnngnnnttcgaacttttttnaaaantnaaccccnannnnnnaanccnnaannnnnnaacccggnttntttttanntttnnnnnttnaagggnnnntnnnnnannntttaaatttnaaaaatttttttnnnaaaaannnnnnnnnnnnnnnnnnnnnnnnnnnnnnnnnnnnnnnnnnnnnnnnnnnnnnnnnnnnnnnnnnnnnnnannnnnnnnnnnannnnnn

SEQ ID NO: 348 - DNA, 1441 bp, Homo Sapiens
  misc_feature (634)..(634): n is a, c, g, or t
  misc_feature (639)..(639): n is a, c, g, or t
  misc_feature (642)..(643): n is a, c, g, or t
  misc_feature (646)..(649): n is a, c, g, or t
  misc_feature (651)..(665): n is a, c, g, or t
  misc_feature (676)..(676): n is a, c, g, or t
  misc_feature (693)..(693): n is a, c, g, or t
  misc_feature (700)..(700): n is a, c, g, or t
  misc_feature (709)..(709): n is a, c, g, or t
  misc_feature (719)..(719): n is a, c, g, or t
  misc_feature (739)..(739): n is a, c, g, or t
  misc_feature (773)..(773): n is a, c, g, or t
  misc_feature (819)..(819): n is a, c, g, or t
  misc_feature (823)..(823): n is a, c, g, or t
  misc_feature (832)..(832): n is a, c, g, or t
  misc_feature (845)..(845): n is a, c, g, or t
  misc_feature (850)..(850): n is a, c, g, or t
  misc_feature (854)..(854): n is a, c, g, or t
  misc_feature (876)..(876): n is a, c, g, or t
  misc_feature (882)..(882): n is a, c, g, or t
  misc_feature (899)..(899): n is a, c, g, or t
  misc_feature (905)..(905): n is a, c, g, or t
  misc_feature (907)..(908): n is a, c, g, or t
  misc_feature (910)..(910): n is a, c, g, or t
  misc_feature (914)..(914): n is a, c, g, or t
  misc_feature (941)..(941): n is a, c, g, or t
  misc_feature (944)..(944): n is a, c, g, or t
  misc_feature (946)..(946): n is a, c, g, or t
  misc_feature (978)..(978): n is a, c, g, or t
  misc_feature (990)..(990): n is a, c, g, or t
  misc_feature (1008)..(1009): n is a, c, g, or t
  misc_feature (1019)..(1019): n is a, c, g, or t
  misc_feature (1022)..(1022): n is a, c, g, or t
  misc_feature (1024)..(1024): n is a, c, g, or t
  misc_feature (1028)..(1028): n is a, c, g, or t
  misc_feature (1032)..(1033): n is a, c, g, or t
  misc_feature (1036)..(1036): n is a, c, g, or t
  misc_feature (1039)..(1039): n is a, c, g, or t
  misc_feature (1048)..(1048): n is a, c, g, or t
  misc_feature (1050)..(1050): n is a, c, g, or t
  misc_feature (1054)..(1054): n is a, c, g, or t
  misc_feature (1065)..(1066): n is a, c, g, or t
  misc_feature (1073)..(1073): n is a, c, g, or t
  misc_feature (1076)..(1076): n is a, c, g, or t
  misc_feature (1078)..(1078): n is a, c, g, or t
  misc_feature (1082)..(1082): n is a, c, g, or t
  misc_feature (1089)..(1089): n is a, c, g, or t
  misc_feature (1091)..(1091): n is a, c, g, or t
  misc_feature (1095)..(1095): n is a, c, g, or t
  misc_feature (1106)..(1106): n is a, c, g, or t
  misc_feature (1108)..(1109): n is a, c, g, or t
  misc_feature (1114)..(1114): n is a, c, g, or t
  misc_feature (1116)..(1118): n is a, c, g, or t
  misc_feature (1122)..(1125): n is a, c, g, or t
  misc_feature (1130)..(1130): n is a, c, g, or t
  misc_feature (1146)..(1146): n is a, c, g, or t
  misc_feature (1149)..(1149): n is a, c, g, or t
  misc_feature (1154)..(1154): n is a, c, g, or t
  misc_feature (1171)..(1171): n is a, c, g, or t
  misc_feature (1176)..(1176): n is a, c, g, or t
  misc_feature (1179)..(1179): n is a, c, g, or t
  misc_feature (1182)..(1182): n is a, c, g, or t
  misc_feature (1184)..(1184): n is a, c, g, or t
  misc_feature (1188)..(1188): n is a, c, g, or t
  misc_feature (1194)..(1194): n is a, c, g, or t
  misc_feature (1197)..(1197): n is a, c, g, or t
  misc_feature (1206)..(1206): n is a, c, g, or t
  misc_feature (1208)..(1211): n is a, c, g, or t
  misc_feature (1222)..(1223): n is a, c, g, or t
  misc_feature (1225)..(1225): n is a, c, g, or t
  misc_feature (1232)..(1240): n is a, c, g, or t
  misc_feature (1243)..(1246): n is a, c, g, or t
  misc_feature (1251)..(1254): n is a, c, g, or t
  misc_feature (1257)..(1258): n is a, c, g, or t
  misc_feature (1261)..(1261): n is a, c, g, or t
  misc_feature (1263)..(1263): n is a, c, g, or t
  misc_feature (1267)..(1267): n is a, c, g, or t
  misc_feature (1270)..(1272): n is a, c, g, or t
  misc_feature (1278)..(1278): n is a, c, g, or t
  misc_feature (1283)..(1285): n is a, c, g, or t
  misc_feature (1288)..(1288): n is a, c, g, or t
  misc_feature (1291)..(1291): n is a, c, g, or t
  misc_feature (1295)..(1295): n is a, c, g, or t
  misc_feature (1297)..(1298): n is a, c, g, or t
  misc_feature (1300)..(1301): n is a, c, g, or t
  misc_feature (1306)..(1306): n is a, c, g, or t
  misc_feature (1316)..(1320): n is a, c, g, or t
  misc_feature (1324)..(1324): n is a, c, g, or t
  misc_feature (1329)..(1329): n is a, c, g, or t
  misc_feature (1340)..(1340): n is a, c, g, or t
  misc_feature (1342)..(1345): n is a, c, g, or t
  misc_feature (1350)..(1351): n is a, c, g, or t
  misc_feature (1353)..(1353): n is a, c, g, or t
  misc_feature (1355)..(1357): n is a, c, g, or t
  misc_feature (1361)..(1365): n is a, c, g, or t
  misc_feature (1367)..(1395): n is a, c, g, or t
  misc_feature (1399)..(1400): n is a, c, g, or t
  misc_feature (1402)..(1402): n is a, c, g, or t
  misc_feature (1407)..(1418): n is a, c, g, or t
  misc_feature (1420)..(1424): n is a, c, g, or t
  misc_feature (1429)..(1429): n is a, c, g, or t
  misc_feature (1431)..(1435): n is a, c, g, or t
  misc_feature (1437)..(1438): n is a, c, g, or t
  misc_feature (1440)..(1441): n is a, c, g, or t
tagagagaattactatgagaggatcgcatcaccatcaccatcacggatcctatttaggtgacactatagaatcgtcgacccacgcgtccgcccacgcgtccgctgtccttggaggagactctgaatgtgacagaaggaaatttccaccagttggtggcactgctacactgccgcagcctgcacaaggactatggtgcagccctgcggggcctgtgcgaagacgccctggaaggcctgctcttcctgctactcttctccctgctgtctgcaggagcgctggccactgccctctgaccactaacactcttggccatggacagcctgcacaggaccgcctccctgctcttggccactgtgctcccatttctgtccttggccttgggagtagctgagggggcagactagggagtagggctggcaggggagggggcagacagcctcgcctcgcacccttcatccctggctgccggtcccatccttggagggactaagctgggggtgggggacatgagtccccctgctgcccctgccacatcccagtgggctctgaccccctgatctcaactcgtggcactaacttggaaaagggttgatttaaaataaaagggaagactattttaaaaaaaaaaaaaanaaaanaannaannnnannnnnnnnnnnnnnnaagggcggccnctccctatagtgagtcntattaancttaattanctgaacttgnactcctgttgataaatccantaatgacctcaaaactccatctggatttgttcanaacgctcggttgccgccgggcgttttttattggtgaaaatccaaanctancttggcaanatttttcaggaanctaangaanctaaaatggaaaaaaaaaatcnctgganaaaaccaccgttgaaanatcccnanngnatcnaaaaaaaaatttttgaggcattttcantcnanttgctcaatgaacctaaaaccaaaccgttcanctggaaaataanggcctttttaaaaaaccnnaaaaaaaaanaancnaaantttnntcnggncctttattnanattntttgccccccnnaaaaaangcncntccnaaatttntnatgnaaaaaaaaaangnnaactngnnnaaannnnaaaantttccccctttttaanccnttttncaaaaaaaaataaaaanttttnttnccntngaanaaaaanccnaaaaatttngnnnnttttaaaaaanntnccaaaannnnnnnnntannnnaaaannnnctnnttncnaagnttnnnaaaaanttttnnnccncancccngnnannttccnttttttaaannnnnaaanaaaantttcccctttncnnnnaaaannanannnaaannnnnannnnnnnnnnnnnnnnnnnnnnnnnnnnnaaannanaaaannnnnnnnnnnngnnnnntttanannnnncnnann

SEQ ID NO: 349 - DNA, 1277 bp, Homo Sapiens
  misc_feature (4)..(4): n is a, c, g, or t
  misc_feature (956)..(957): n is a, c, g, or t
  misc_feature (964)..(964): n is a, c, g, or t
  misc_feature (994)..(994): n is a, c, g, or t
  misc_feature (997)..(997): n is a, c, g, or t
  misc_feature (1009)..(1009): n is a, c, g, or t
  misc_feature (1014)..(1014): n is a, c, g, or t
  misc_feature (1019)..(1020): n is a, c, g, or t
  misc_feature (1035)..(1035): n is a, c, g, or t
  misc_feature (1044)..(1045): n is a, c, g, or t
  misc_feature (1057)..(1057): n is a, c, g, or t
  misc_feature (1069)..(1069): n is a, c, g, or t
  misc_feature (1094)..(1094): n is a, c, g, or t
  misc_feature (1097)..(1097): n is a, c, g, or t
  misc_feature (1100)..(1100): n is a, c, g, or t
  misc_feature (1103)..(1103): n is a, c, g, or t
  misc_feature (1108)..(1108): n is a, c, g, or t
  misc_feature (1114)..(1114): n is a, c, g, or t
  misc_feature (1117)..(1117): n is a, c, g, or t
  misc_feature (1124)..(1124): n is a, c, g, or t
  misc_feature (1131)..(1131): n is a, c, g, or t
  misc_feature (1140)..(1141): n is a, c, g, or t
  misc_feature (1144)..(1144): n is a, c, g, or t
  misc_feature (1147)..(1147): n is a, c, g, or t
  misc_feature (1154)..(1154): n is a, c, g, or t
  misc_feature (1156)..(1156): n is a, c, g, or t
  misc_feature (1168)..(1168): n is a, c, g, or t
  misc_feature (1186)..(1186): n is a, c, g, or t
  misc_feature (1194)..(1194): n is a, c, g, or t
  misc_feature (1207)..(1207): n is a, c, g, or t
  misc_feature (1211)..(1212): n is a, c, g, or t
  misc_feature (1220)..(1220): n is a, c, g, or t
  misc_feature (1231)..(1232): n is a, c, g, or t
  misc_feature (1246)..(1246): n is a, c, g, or t
  misc_feature (1250)..(1250): n is a, c, g, or t
  misc_feature (1254)..(1254): n is a, c, g, or t
  misc_feature (1259)..(1259): n is a, c, g, or t
  misc_feature (1270)..(1270): n is a, c, g, or t
  misc_feature (1274)..(1274): n is a, c, g, or t
gagnaattactatgagaggatcgcatcaccatcaccatcacggatcctatttaggtgacactatagaatcgtcgacccacgcgtccgaaattcagaagaaattagaagctgcagaagaaagacgcaagtcccatgaagctgaggtcttgaagcagctggctgagaaacgagagcacgagaaagaagtgcttcagaaggcaatagaagagaacaacaacttcagtaaaatggcagaagagaaactgacccacaaaatggaagctaataaagagaaccgagaggcacaaatggctgccaaactggaacgtttgcgagagaaggataagcacattgaagaagtgcggaagaacaaagaatccaaagaccctgctgacgagactgaagctgactaatttgttctgagaactgactttctccccatccccttcctaaatatccaaagactgtactggccagtgtcattttattttttccctcctgacaaatattttagaagctaatgtaggactgtataggtagatccagatccagactgtaagatgttgttttaggggctaaaggggagaaactgaaagtgttttactctttttctaaagtgttggtctttctaatgtagctatttttcttgttgcatcttttctacttcagtacacttggtgtactgggttaatggctagtactgtattggctctgtgaaaacatatttgtgaaaagagtatgtagtggcttcttttgaactgttagatgctgaatatctgttcacttttcaatcccaattctgtcccaatcttaccagatgctactggacttgaatggttaataaaactgcacagtgctgttggtggcagtgacaaaaaaaaaaaaaaaaaaaaagggcggccgctccctatagtgagtcgtattaagcttaattagctgagcttggactcctgttgatagatccagtaatgacctcnnaactccntctggatttgttcaaaacgctcggttgccnccngggcgttttttnttggngaaannccaagctagcttggngagattttnnggacctaaggancctaaaatgganaaaaaaatccctgggaaaacccccngtnganatntcccnatggcntcntaaaaanattttgnggcatttcnntcngtngccccangnaccctaaaaccnaaccgttcccctggaaantacggccntttttaaaacccntaannaaaaaaanccccagttttnnccggccttttttcnattnttgnccccnggaaaaggccncccngaa

SEQ ID NO: 350 - DNA, 1407 bp, Homo Sapiens
  misc_feature (1)..(2): n is a, c, g, or t
  misc_feature (778)..(778): n is a, c, g, or t
  misc_feature (800)..(800): n is a, c, g, or t
  misc_feature (814)..(814): n is a, c, g, or t
  misc_feature (816)..(816): n is a, c, g, or t
  misc_feature (872)..(872): n is a, c, g, or t
  misc_feature (890)..(890): n is a, c, g, or t
  misc_feature (903)..(903): n is a, c, g, or t
  misc_feature (977)..(977): n is a, c, g, or t
  misc_feature (1001)..(1001): n is a, c, g, or t
  misc_feature (1005)..(1005): n is a, c, g, or t
  misc_feature (1021)..(1022): n is a, c, g, or t
  misc_feature (1036)..(1037): n is a, c, g, or t
  misc_feature (1044)..(1044): n is a, c, g, or t
  misc_feature (1048)..(1050): n is a, c, g, or t
  misc_feature (1052)..(1056): n is a, c, g, or t
  misc_feature (1058)..(1058): n is a, c, g, or t
  misc_feature (1060)..(1071): n is a, c, g, or t
  misc_feature (1076)..(1076): n is a, c, g, or t
  misc_feature (1080)..(1080): n is a, c, g, or t
  misc_feature (1083)..(1083): n is a, c, g, or t
  misc_feature (1085)..(1085): n is a, c, g, or t
  misc_feature (1097)..(1097): n is a, c, g, or t
  misc_feature (1100)..(1100): n is a, c, g, or t
  misc_feature (1102)..(1103): n is a, c, g, or t
  misc_feature (1105)..(1105): n is a, c, g, or t
  misc_feature (1111)..(1111): n is a, c, g, or t
  misc_feature (1115)..(1115): n is a, c, g, or t
  misc_feature (1117)..(1117): n is a, c, g, or t
  misc_feature (1121)..(1121): n is a, c, g, or t
  misc_feature (1129)..(1129): n is a, c, g, or t
  misc_feature (1133)..(1133): n is a, c, g, or t
  misc_feature (1138)..(1139): n is a, c, g, or t
  misc_feature (1150)..(1151): n is a, c, g, or t
  misc_feature (1155)..(1155): n is a, c, g, or t
  misc_feature (1159)..(1160): n is a, c, g, or t
  misc_feature (1165)..(1167): n is a, c, g, or t
  misc_feature (1169)..(1169): n is a, c, g, or t
  misc_feature (1171)..(1171): n is a, c, g, or t
  misc_feature (1181)..(1181): n is a, c, g, or t
  misc_feature (1187)..(1187): n is a, c, g, or t
  misc_feature (1189)..(1190): n is a, c, g, or t
  misc_feature (1199)..(1199): n is a, c, g, or t
  misc_feature (1212)..(1212): n is a, c, g, or t
  misc_feature (1220)..(1220): n is a, c, g, or t
  misc_feature (1223)..(1223): n is a, c, g, or t
  misc_feature (1226)..(1227): n is a, c, g, or t
  misc_feature (1231)..(1231): n is a, c, g, or t
  misc_feature (1233)..(1233): n is a, c, g, or t
  misc_feature (1237)..(1237): n is a, c, g, or t
  misc_feature (1242)..(1243): n is a, c, g, or t
  misc_feature (1246)..(1247): n is a, c, g, or t
  misc_feature (1250)..(1250): n is a, c, g, or t
  misc_feature (1254)..(1254): n is a, c, g, or t
  misc_feature (1261)..(1261): n is a, c, g, or t
  misc_feature (1263)..(1263): n is a, c, g, or t
  misc_feature (1273)..(1274): n is a, c, g, or t
  misc_feature (1279)..(1279): n is a, c, g, or t
  misc_feature (1286)..(1287): n is a, c, g, or t
  misc_feature (1289)..(1289): n is a, c, g, or t
  misc_feature (1292)..(1292): n is a, c, g, or t
  misc_feature (1301)..(1304): n is a, c, g, or t
  misc_feature (1314)..(1314): n is a, c, g, or t
  misc_feature (1317)..(1317): n is a, c, g, or t
  misc_feature (1322)..(1326): n is a, c, g, or t
  misc_feature (1328)..(1328): n is a, c, g, or t
  misc_feature (1331)..(1331): n is a, c, g, or t
  misc_feature (1335)..(1335): n is a, c, g, or t
  misc_feature (1344)..(1344): n is a, c, g, or t
  misc_feature (1346)..(1349): n is a, c, g, or t
  misc_feature (1354)..(1357): n is a, c, g, or t
  misc_feature (1366)..(1367): n is a, c, g, or t
  misc_feature (1374)..(1379): n is a, c, g, or t
  misc_feature (1383)..(1386): n is a, c, g, or t
  misc_feature (1395)..(1400): n is a, c, g, or t
  misc_feature (1403)..(1406): n is a, c, g, or t
nnattagagaaattaactatgagaggatcgcatcaccattcaccaatcacggatcctatttaggtgacactatagaatcgtcgacccacgcgatccgcccacctacggggacctcaaccacctggtgtcggccaccatgagcggggtcaccacctgcctgcgcttcccgggccagctgaacgcagacctgcgcaagctggcggtgaacatggtgcccttccctcgcctgcacttcttcatgcccggcttcgcgcccctgaccagccggggcagccagcagtaccgggcgctcacggtgcccgagctcacccagcagatgttcgactccaagaacatgatggccgcctgcgacccgcgccacggccgctacctgacggtggctgccatcttccggggccgcatgtccatgaaggaggtggacgagcagatgctcaacgtgcagaacaagaacagcagctacttcgtggagtggatccccaacaacgtgaagacggccgtgtgcgacatcccgccccgcggcctgaagatgtcggccaccttcatcggcaacagcacggccatccaggagctgttcaagcgcatctccgagcagttcacggccatgttccggcgcaaggccttcctgcactggtacacgggcgagggcatggacgagatggagttcaccgaggccgagagcaacatgaacgacctggtgtccgagtaccagcagtaccaggacgccacggccgacgaacaaggggagttcgaggaggaggagggcgaggacgaggcgtanatgcccccgcgagacgggttanggaaaagcggaagnangaaagcgagggggtggggggcttcccgggacgataacctggcagtggaaggaaaanaagcatggtctactttangtgtgcgctgggntctctggtgctcttcactgttgcctgtcactttttttttccttttttgtaatattgaagaaatcaatgtaacanttgaaatatttctgaaattactgnttgnaatgggctaaaatcannataaacgttttgtnntcggaanaaannnannnnnanannnnnnnnnnnnaaaangggnggncncctcccttaaanggnanncnaataancttnanttantgaacttngaantcctnntgaaaaatccnnaaanaccnnaaaannncntnggattttttnaaaaancnngtttccccngggtttttttttnggaaaaancanctnntttngnaaanttttnnganntangaanttaaatngnaaaaaaattnnggaanacccccnntnaanttccagggnnnnaaaaaatttnggnttttnnnnntncantaanaaaaaaaantnnnngaaannnnttttaaacnnaaaaaannnnnntttnnnnttttttttnnnnnnaannnnc

SEQ ID NO: 351 - DNA, 1299 bp, Homo Sapiens
  misc_feature (930)..(930): n is a, c, g, or t
  misc_feature (954)..(954): n is a, c, g, or t
  misc_feature (966)..(966): n is a, c, g, or t
  misc_feature (993)..(993): n is a, c, g, or t
  misc_feature (1002)..(1002): n is a, c, g, or t
  misc_feature (1005)..(1005): n is a, c, g, or t
  misc_feature (1015)..(1016): n is a, c, g, or t
  misc_feature (1031)..(1031): n is a, c, g, or t
  misc_feature (1037)..(1037): n is a, c, g, or t
  misc_feature (1043)..(1043): n is a, c, g, or t
  misc_feature (1045)..(1045): n is a, c, g, or t
  misc_feature (1050)..(1050): n is a, c, g, or t
  misc_feature (1055)..(1055): n is a, c, g, or t
  misc_feature (1074)..(1074): n is a, c, g, or t
  misc_feature (1076)..(1076): n is a, c, g, or t
  misc_feature (1085)..(1085): n is a, c, g, or t
  misc_feature (1096)..(1096): n is a, c, g, or t
  misc_feature (1115)..(1115): n is a, c, g, or t
  misc_feature (1124)..(1124): n is a, c, g, or t
  misc_feature (1128)..(1128): n is a, c, g, or t
  misc_feature (1138)..(1138): n is a, c, g, or t
  misc_feature (1144)..(1144): n is a, c, g, or t
  misc_feature (1153)..(1153): n is a, c, g, or t
  misc_feature (1162)..(1162): n is a, c, g, or t
  misc_feature (1167)..(1167): n is a, c, g, or t
  misc_feature (1175)..(1175): n is a, c, g, or t
  misc_feature (1178)..(1178): n is a, c, g, or t
  misc_feature (1194)..(1194): n is a, c, g, or t
  misc_feature (1197)..(1197): n is a, c, g, or t
  misc_feature (1199)..(1199): n is a, c, g, or t
  misc_feature (1210)..(1210): n is a, c, g, or t
  misc_feature (1215)..(1215): n is a, c, g, or t
  misc_feature (1217)..(1217): n is a, c, g, or t
  misc_feature (1221)..(1223): n is a, c, g, or t
  misc_feature (1225)..(1225): n is a, c, g, or t
  misc_feature (1231)..(1231): n is a, c, g, or t
  misc_feature (1258)..(1260): n is a, c, g, or t
  misc_feature (1270)..(1270): n is a, c, g, or t
  misc_feature (1276)..(1276): n is a, c, g, or t
  misc_feature (1284)..(1285): n is a, c, g, or t
  misc_feature (1288)..(1288): n is a, c, g, or t
  misc_feature (1293)..(1293): n is a, c, g, or t
  misc_feature (1299)..(1299): n is a, c, g, or t
atagagaaattactatgagaggatcgcatcaccatcaccatcacggatcctatttaggtgacactatagaatcgtcgacccacgcgtccgggatgagtctcaagatggacaaccgggatgttgcaggaaaggctaaccggtggtttggggttgctccccctaaatctggaaaaatgaacatgaacatccttcaccaggaagagctcatcgctcagaagaaacgggaaattgaagccaaaatggaacagaaagccaagcagaatcaggtggccagccctcagcccccacatcctggcgaaatcacaaatgcacacaactcttcctgcatttccaacaagtttgccaacgatggtagcttcttgcagcagtttctgaagttgcagaaggcacagaccagcacagacgccccgaccagtgcgcccagcgcccctcccagcacacccacccccagcgctgggaagaggtccctgctcatcagcaggcggacaggcctggggctggccagcctgccgggccctgtgaagagctactcccacgccaagcagctgcccgtggcgcaccgcccgagtgtcttccagtcccctgacgaggacgaggaggaggactatgagcagtggctggagatcaaagtttcacccccagagggagccgagactcggaaagtgatagagaaattggcccgctttgtggcagaaggaggccccgagttagaaaaagtagctatggaggactacaaggataacccagcatttgcatttttgcacgataagaatagcagggaattcctctactacaggaagaaggtggctgagataagaaaggaagcacagaagtcgcaggcagcctctcagaaagtttcacccccagaggacgaagaggtcaagaaccttgcagaaaagttggccaggttcatagcggacgggggtcccnaaggtggaaaccattgccctccanaacaaccgtganaaccaggcattcagctttctgtatganccccaatanccnaggggtacanntactaccgacagaanctggangaattncngaaangccanggccagctccaaaggcagntncaaagcacntgatcccggcntgaaacgcaagtcccctcntgaaggccntgtnagggttcttnaccccnagccaacanctggcccgnctttntcaagctnggnccaataaaattcctgntcnanttgccccgggnaaacngnttcnnnancccccntaaaaaaaacgaaaaaccgggggggcnnnaaaaaaaaanaaaaantccccttnnaantggtnaaaaan

SEQ ID NO: 352 - DNA, 1271 bp, Homo Sapiens
  misc_feature (901)..(901): n is a, c, g, or t
  misc_feature (903)..(903): n is a, c, g, or t
  misc_feature (934)..(934): n is a, c, g, or t
  misc_feature (945)..(945): n is a, c, g, or t
  misc_feature (948)..(948): n is a, c, g, or t
  misc_feature (968)..(968): n is a, c, g, or t
  misc_feature (970)..(970): n is a, c, g, or t
  misc_feature (972)..(972): n is a, c, g, or t
  misc_feature (991)..(991): n is a, c, g, or t
  misc_feature (1002)..(1002): n is a, c, g, or t
  misc_feature (1004)..(1004): n is a, c, g, or t
  misc_feature (1013)..(1013): n is a, c, g, or t
  misc_feature (1015)..(1015): n is a, c, g, or t
  misc_feature (1023)..(1023): n is a, c, g, or t
  misc_feature (1033)..(1033): n is a, c, g, or t
  misc_feature (1038)..(1038): n is a, c, g, or t
  misc_feature (1056)..(1056): n is a, c, g, or t
  misc_feature (1059)..(1059): n is a, c, g, or t
  misc_feature (1078)..(1078): n is a, c, g, or t
  misc_feature (1086)..(1086): n is a, c, g, or t
  misc_feature (1090)..(1090): n is a, c, g, or t
  misc_feature (1093)..(1093): n is a, c, g, or t
  misc_feature (1112)..(1112): n is a, c, g, or t
  misc_feature (1119)..(1119): n is a, c, g, or t
  misc_feature (1127)..(1128): n is a, c, g, or t
  misc_feature (1135)..(1135): n is a, c, g, or t
  misc_feature (1150)..(1150): n is a, c, g, or t
  misc_feature (1153)..(1153): n is a, c, g, or t
  misc_feature (1157)..(1157): n is a, c, g, or t
  misc_feature (1164)..(1164): n is a, c, g, or t
  misc_feature (1179)..(1179): n is a, c, g, or t
  misc_feature (1195)..(1195): n is a, c, g, or t
  misc_feature (1197)..(1197): n is a, c, g, or t
  misc_feature (1203)..(1203): n is a, c, g, or t
  misc_feature (1216)..(1216): n is a, c, g, or t
  misc_feature (1219)..(1219): n is a, c, g, or t
  misc_feature (1224)..(1224): n is a, c, g, or t
  misc_feature (1229)..(1229): n is a, c, g, or t
  misc_feature (1232)..(1232): n is a, c, g, or t
  misc_feature (1237)..(1237): n is a, c, g, or t
  misc_feature (1239)..(1239): n is a, c, g, or t
  misc_feature (1243)..(1244): n is a, c, g, or t
  misc_feature (1250)..(1250): n is a, c, g, or t
  misc_feature (1264)..(1264): n is a, c, g, or t
agagaaattactatgagaggatcgcatcaccatcaccatcacggatcctatttaggtgacactatagaatcgtcgacccacgcgtccgcccacgcgtccggctctgagtatgagacgatgctgacggagatcatgtccatgggctatgagcgagagcgggtcgtggccgccctgagagccagctacaacaacccccaccgagccgtggagtatctgctcacgggaattcctgggagccccgagccggaacacggttctgtccaggagagccaggtatcggagcagccggccacggaagcaggagagaaccccctggagttcctgcgggaccagccccagttccagaacatgcggcaggtgattcagcagaaccctgcgctgctgcccgccctgctccagcagctgggccaggagaaccctcagcttttacagcaaatcagccggcaccaggagcagttcatccagatgctgaacgagccccctggggagctggcggacatctcagatgtggagggggaggtgggcgccataggagaggaggccccgcagatgaactacatccaggtgacgccgcaggagaaagaagctatagagaggttgaaggccctgggcttcccagagagcctggtcatccaggcctatttcgcgtgtgaaaaaaatgagaacttggctgccaacttcctcctgagtcagaactttgatgacgagtgatgccaggaagccaggccaccgaagcccccaccctacccttattccatgaaagttttataaaagaaaaaatatatatatattcatgtttatttaagaaatggaaaaaaaaatcaaaaatcttaaaaaaacaagcaaacagtccagcttcctgtcctcctaaagtggcccctgttcccatctccggggccananagctgtccccccgtccttcctcccagcccancctgctcaaanaanctggcaggactggggaggcnananatgggcccctcttggcctntgtcccagctntntgcaaccananggaaaagncggctgcttnccctntccattcttccgaaaaanccnctgaagaaccccccccccntctttttntagnatnaggggaaactggaaccccnacttttnattctccnnttggagngggcccaaatttttnccntttngggcaanttcttgaaaggcccnagggcccccctcccantntgggcnttggccccccccnggnaaaangggtnaanttacncntttnntaaggncccccccccccccnaaaaaaa

SEQ ID NO: 353 - DNA, 1268 bp, Homo Sapiens
  misc_feature (862)..(862): n is a, c, g, or t
  misc_feature (890)..(890): n is a, c, g, or t
  misc_feature (938)..(938): n is a, c, g, or t
  misc_feature (952)..(952): n is a, c, g, or t
  misc_feature (954)..(954): n is a, c, g, or t
  misc_feature (966)..(966): n is a, c, g, or t
  misc_feature (970)..(970): n is a, c, g, or t
  misc_feature (974)..(974): n is a, c, g, or t
  misc_feature (983)..(983): n is a, c, g, or t
  misc_feature (990)..(990): n is a, c, g, or t
  misc_feature (993)..(993): n is a, c, g, or t
  misc_feature (995)..(995): n is a, c, g, or t
  misc_feature (1012)..(1012): n is a, c, g, or t
  misc_feature (1067)..(1067): n is a, c, g, or t
  misc_feature (1080)..(1080): n is a, c, g, or t
  misc_feature (1085)..(1085): n is a, c, g, or t
  misc_feature (1091)..(1091): n is a, c, g, or t
  misc_feature (1107)..(1107): n is a, c, g, or t
  misc_feature (1114)..(1114): n is a, c, g, or t
  misc_feature (1123)..(1123): n is a, c, g, or t
  misc_feature (1136)..(1136): n is a, c, g, or t
  misc_feature (1139)..(1139): n is a, c, g, or t
  misc_feature (1141)..(1141): n is a, c, g, or t
  misc_feature (1146)..(1146): n is a, c, g, or t
  misc_feature (1157)..(1157): n is a, c, g, or t
  misc_feature (1167)..(1168): n is a, c, g, or t
  misc_feature (1172)..(1172): n is a, c, g, or t
  misc_feature (1174)..(1175): n is a, c, g, or t
  misc_feature (1178)..(1178): n is a, c, g, or t
  misc_feature (1189)..(1189): n is a, c, g, or t
  misc_feature (1207)..(1207): n is a, c, g, or t
  misc_feature (1210)..(1210): n is a, c, g, or t
  misc_feature (1217)..(1217): n is a, c, g, or t
  misc_feature (1231)..(1231): n is a, c, g, or t
  misc_feature (1233)..(1233): n is a, c, g, or t
  misc_feature (1236)..(1236): n is a, c, g, or t
  misc_feature (1241)..(1241): n is a, c, g, or t
  misc_feature (1251)..(1251): n is a, c, g, or t
  misc_feature (1253)..(1253): n is a, c, g, or t
  misc_feature (1258)..(1258): n is a, c, g, or t
  misc_feature (1267)..(1267): n is a, c, g, or t
tagagaaattactatgagaggatcgcatcaccatcaccatcacggatcctatttaggtgacactatagaatcgtcgacccacgcgtccggtcctggtgacgagtcccgcgttctctccttgaatccactcgccagcccgccgccctctgccgccgcaccctgcacacccgcccctctcctgtgccaggaacttgctactaccagcaccatgccctaccaatatccagcactgaccccggagcagaagaaggagctgtctgacatcgctcaccgcatcgtggcacctggcaagggcatcctggctgcagatgagtccactgggagcattgccaagcggctgcagtccattggcaccgagaacaccgaggagaaccggcgcttctaccgccagctgctgctgacagctgacgaccgcgtgaacccctgcattgggggtgtcatcctcttccatgagacactctaccagaaggcggatgatgggcgtcccttcccccaagttatcaaatccaagggcggtgttgtgggcatcaaggtagacaagggcgtggtccccctggcagggacaaatggcgagactaccacccaagggttggatgggctgtctgagcgctgtgcccagtacaagaaggacggagctgacttcgccaagtggcgttgtgtgctgaagattggggaacacaccccctcagccctcgccatcatggaaaatgccaatgttctggcccgttatgccagtatctgccagcagaatggcattgtgcccatcgtggagcctgagatcctccctgatggggaccatgacttgaagcgctgccagtatgtgaccgagaaaggtgctggctgctgtctacaaggctctgantgaccaccacatctacctggaaggcacnttgctgaagcccaacatggtcaccccaggccatgcttgcactcaaaantttttctcatgagnanattgccatgggngacngttnaaaggcgcntgcgccncanantgcccccccggctttcntggggaatccccttttctggtctggaaggccaaaagtgaaggaaggaaggcgtcnattaaaccctcantgccnattaanaaagtgccccccctgnctgaaanccctggggnccttgaacctttnccntnaaggncgaaacccctngagggccttnngccntnnaanggcttgggggngggaaaaaaaaaaaaaanttnaaggttncccaaaaagaaaananttnaaggnaacccttggncnaaaanctttttctnt

SEQ ID NO: 354 - DNA, 1410 bp, Homo Sapiens
  misc_feature (903)..(903): n is a, c, g, or t
  misc_feature (929)..(929): n is a, c, g, or t
  misc_feature (933)..(933): n is a, c, g, or t
  misc_feature (945)..(945): n is a, c, g, or t
  misc_feature (948)..(948): n is a, c, g, or t
  misc_feature (950)..(950): n is a, c, g, or t
  misc_feature (961)..(961): n is a, c, g, or t
  misc_feature (980)..(980): n is a, c, g, or t
  misc_feature (983)..(983): n is a, c, g, or t
  misc_feature (986)..(986): n is a, c, g, or t
  misc_feature (993)..(993): n is a, c, g, or t
  misc_feature (1007)..(1007): n is a, c, g, or t
  misc_feature (1016)..(1016): n is a, c, g, or t
  misc_feature (1027)..(1028): n is a, c, g, or t
  misc_feature (1032)..(1033): n is a, c, g, or t
  misc_feature (1047)..(1047): n is a, c, g, or t
  misc_feature (1052)..(1052): n is a, c, g, or t
  misc_feature (1060)..(1060): n is a, c, g, or t
  misc_feature (1068)..(1068): n is a, c, g, or t
  misc_feature (1081)..(1081): n is a, c, g, or t
  misc_feature (1101)..(1101): n is a, c, g, or t
  misc_feature (1117)..(1117): n is a, c, g, or t
  misc_feature (1121)..(1121): n is a, c, g, or t
  misc_feature (1143)..(1143): n is a, c, g, or t
  misc_feature (1148)..(1148): n is a, c, g, or t
  misc_feature (1151)..(1151): n is a, c, g, or t
  misc_feature (1161)..(1161): n is a, c, g, or t
  misc_feature (1181)..(1181): n is a, c, g, or t
  misc_feature (1197)..(1198): n is a, c, g, or t
  misc_feature (1220)..(1220): n is a, c, g, or t
  misc_feature (1229)..(1230): n is a, c, g, or t
  misc_feature (1232)..(1234): n is a, c, g, or t
  misc_feature (1239)..(1239): n is a, c, g, or t
  misc_feature (1241)..(1241): n is a, c, g, or t
  misc_feature (1249)..(1249): n is a, c, g, or t
  misc_feature (1252)..(1252): n is a, c, g, or t
  misc_feature (1254)..(1254): n is a, c, g, or t
  misc_feature (1260)..(1260): n is a, c, g, or t
  misc_feature (1268)..(1268): n is a, c, g, or t
  misc_feature (1271)..(1272): n is a, c, g, or t
  misc_feature (1275)..(1275): n is a, c, g, or t
  misc_feature (1286)..(1286): n is a, c, g, or t
  misc_feature (1289)..(1289): n is a, c, g, or t
  misc_feature (1291)..(1291): n is a, c, g, or t
  misc_feature (1294)..(1294): n is a, c, g, or t
  misc_feature (1296)..(1297): n is a, c, g, or t
  misc_feature (1302)..(1302): n is a, c, g, or t
  misc_feature (1305)..(1305): n is a, c, g, or t
  misc_feature (1307)..(1307): n is a, c, g, or t
  misc_feature (1311)..(1311): n is a, c, g, or t
  misc_feature (1318)..(1319): n is a, c, g, or t
  misc_feature (1337)..(1337): n is a, c, g, or t
  misc_feature (1339)..(1339): n is a, c, g, or t
  misc_feature (1348)..(1348): n is a, c, g, or t
  misc_feature (1368)..(1368): n is a, c, g, or t
  misc_feature (1410)..(1410): n is a, c, g, or t
agagagattactatgagaggatcgcatcaccatcaccatcacggatcctatttaggtgacactatagaatcgtcgacccacgcgtccgcaaaaaacaacaacaacaaaacaaaaaccaaaaaggaaaatgtagcatgttggctaaaactggagcaaagtgcactaaaacaatttcctgaactcacctgttgtactattcaccttttaaaccataaattgctctttagccatttgtagtgcagtaaatgttacaggaaaagacttggcacattttcttccaaattttaagaggtgattttcaaaagctttattggggtatgttgtcagaccagggttttcagagttgatggaaaagagtcttgtgagaaaacttattttgataaattattacacacgcagaaaaactgatcacactgactggatctgtccacgacatggaaaataaactggattttcagaaaaaaaaaaaaaaaaagggcggccgctccctatagtgagtcgtattaagcttaattagctgagcttggactcctgttgatagatccagtaatgacctcagaactccatctggatttgttcagaacgctcggttgccgccgggcgttttttattggtgagaatccaagctagcttggcgagattttcaggagctaaggaagctaaaatggagaaaaaaatcactggatataccaccgttgatatatcccaatggcatcgtaaagaacattttgaggcatttcagtcagttgctcaatgtacctataaccagaccgttcagctggatattacggccttttttaaagaccgtaaagaaaaataagcacaagttttatccggcctttattcacattcttgcccgcctgatgaatgctcatccggaatttcgtatggcaatgaaagacnggggagctggtgatatgggatagtgntccnccccttggtacnccngnttttccatgancaaactgaaaacgttttcntcnccnctggagngaaaaccaccgacnatttcccgncagtttctacnnatanntttccccaaaaggnggcgngttacggngaaaaccnggcctatttcccnaaaggggtttattggaaaanatgtttttcccccccncccnaaccccggggggaatttccccngtttnganttaaccgggnccaattgggaaaccttcctnccccccgttttccccnngggcaaaaattaaccccagggnaaaaggggnnannnccccngngattccgntcncnggcccnttggggangcnnccngccccccaagnctnanaantnnccctnccncnaaanggccggnnggcccaaatttttagggntntgggccccnaaccccggggaaaccccccnttgggcccaaaaaaaggcccccaaaagggccttttttttttn

SEQ ID NO: 355 - DNA, 1399 bp, Homo Sapiens
  misc_feature (1)..(1): n is a, c, g, or t
  misc_feature (7)..(7): n is a, c, g, or t
  misc_feature (842)..(842): n is a, c, g, or t
  misc_feature (881)..(881): n is a, c, g, or t
  misc_feature (938)..(938): n is a, c, g, or t
  misc_feature (942)..(942): n is a, c, g, or t
  misc_feature (945)..(945): n is a, c, g, or t
  misc_feature (950)..(950): n is a, c, g, or t
  misc_feature (961)..(961): n is a, c, g, or t
  misc_feature (966)..(966): n is a, c, g, or t
  misc_feature (985)..(985): n is a, c, g, or t
  misc_feature (989)..(989): n is a, c, g, or t
  misc_feature (993)..(993): n is a, c, g, or t
  misc_feature (1009)..(1009): n is a, c, g, or t
  misc_feature (1012)..(1012): n is a, c, g, or t
  misc_feature (1022)..(1022): n is a, c, g, or t
  misc_feature (1036)..(1037): n is a, c, g, or t
  misc_feature (1050)..(1050): n is a, c, g, or t
  misc_feature (1055)..(1056): n is a, c, g, or t
  misc_feature (1059)..(1059): n is a, c, g, or t
  misc_feature (1064)..(1064): n is a, c, g, or t
  misc_feature (1072)..(1072): n is a, c, g, or t
  misc_feature (1077)..(1077): n is a, c, g, or t
  misc_feature (1106)..(1107): n is a, c, g, or t
  misc_feature (1109)..(1110): n is a, c, g, or t
  misc_feature (1122)..(1123): n is a, c, g, or t
  misc_feature (1128)..(1128): n is a, c, g, or t
  misc_feature (1147)..(1148): n is a, c, g, or t
  misc_feature (1157)..(1157): n is a, c, g, or t
  misc_feature (1161)..(1162): n is a, c, g, or t
  misc_feature (1171)..(1171): n is a, c, g, or t
  misc_feature (1175)..(1176): n is a, c, g, or t
  misc_feature (1182)..(1182): n is a, c, g, or t
  misc_feature (1192)..(1192): n is a, c, g, or t
  misc_feature (1203)..(1203): n is a, c, g, or t
  misc_feature (1207)..(1207): n is a, c, g, or t
  misc_feature (1214)..(1214): n is a, c, g, or t
  misc_feature (1216)..(1216): n is a, c, g, or t
  misc_feature (1221)..(1221): n is a, c, g, or t
  misc_feature (1227)..(1227): n is a, c, g, or t
  misc_feature (1230)..(1230): n is a, c, g, or t
  misc_feature (1247)..(1247): n is a, c, g, or t
  misc_feature (1256)..(1256): n is a, c, g, or t
  misc_feature (1263)..(1263): n is a, c, g, or t
  misc_feature (1267)..(1267): n is a, c, g, or t
  misc_feature (1276)..(1276): n is a, c, g, or t
  misc_feature (1278)..(1279): n is a, c, g, or t
  misc_feature (1287)..(1287): n is a, c, g, or t
  misc_feature (1290)..(1290): n is a, c, g, or t
  misc_feature (1306)..(1306): n is a, c, g, or t
  misc_feature (1311)..(1311): n is a, c, g, or t
  misc_feature (1314)..(1314): n is a, c, g, or t
  misc_feature (1321)..(1321): n is a, c, g, or t
  misc_feature (1324)..(1324): n is a, c, g, or t
  misc_feature (1328)..(1328): n is a, c, g, or t
  misc_feature (1333)..(1333): n is a, c, g, or t
  misc_feature (1344)..(1344): n is a, c, g, or t
  misc_feature (1360)..(1360): n is a, c, g, or t
  misc_feature (1394)..(1394): n is a, c, g, or t
ntagagnaattactatgagaggatcgcatcaccatcaccatcacggatcctatttaggtgacactatagaatcgtcgacccacgcgtccgcaaaaaacaacaacaacaaaacaaaaaccaaaaaggaaaatgtagcatgttggctaaaactggagcaaagtgcactaaaacaatttcctgaactcacctgttgtactattcaccttttaaaccataaattgctctttagccatttgtagtgcagtaaatgttacaggaaaagacttggcacattttcttccaaattttaagaggtgattttcaaaagctttattggggtatgttgtcagaccagggttttcagagttgatggaaaagagtcttgtgagaaaacttattttgataaattattacacacgcagaaaaactgatcacactgactggatctgtccacgacatggaaaataaactggattttcagaaaaaaaaaaaaaaaaagggcggccgctccctatagtgagtcgtattaagcttaattagctgagcttggactcctgttgatagatccagtaatgacctcagaactccatctggatttgttcagaacgctcggttgccgccgggcgttttttattggtgagaatccaagctagcttggcgagattttcaggagctaaggaagctaaaatggagaaaaaaatcactggatataccaccgttgatatatcccaatggcatcgtaaagaacattttgaggcatttcagtcagttgctcaatgtacctataaccagaccgttcagctggatattacggcctttttaaagaccgtaaagaaaaataagcacaagttttatcccggccntttattcacattcttgcccgcctgatgaatgctcatccnggaatttcgtatggcaatgaaaagacggtgagctggtgatatgggaatagtggttcncccntgnttacnccgtttttccntgaancaaactgaaacgtttttcntccnctcngggagggaataccccnacnaatttcccgnccgttcctacccanntattcccaaaaangggcnngtnacggngaaaaccnggccnaatttcccctaaagggtttattggaaaanngnnttttcccccccnnccaanccccgggggaattcccccnnttttgattnaacnngggcccaangggnnaacttnctcccccccntttttcccccngggncaaaatntnacccnaggccnaanggggctgatccccctgncattccggntccccangccnttgggaggncnncccggccnccnaagccttatgtattanccccnccnccaaaangcngggnggccnaatttttaagnaattggggcccccaancccggggaaaaccccccctggggccaaaaaaaangcccc

SEQ ID NO: 356 - DNA, 1410 bp, Homo Sapiens
  misc_feature (781)..(781): n is a, c, g, or t
  misc_feature (873)..(873): n is a, c, g, or t
  misc_feature (876)..(876): n is a, c, g, or t
  misc_feature (886)..(886): n is a, c, g, or t
  misc_feature (899)..(899): n is a, c, g, or t
  misc_feature (908)..(908): n is a, c, g, or t
  misc_feature (930)..(930): n is a, c, g, or t
  misc_feature (942)..(942): n is a, c, g, or t
  misc_feature (949)..(949): n is a, c, g, or t
  misc_feature (953)..(953): n is a, c, g, or t
  misc_feature (964)..(964): n is a, c, g, or t
  misc_feature (968)..(968): n is a, c, g, or t
  misc_feature (979)..(979): n is a, c, g, or t
  misc_feature (985)..(985): n is a, c, g, or t
  misc_feature (990)..(990): n is a, c, g, or t
  misc_feature (1011)..(1013): n is a, c, g, or t
  misc_feature (1017)..(1018): n is a, c, g, or t
  misc_feature (1021)..(1021): n is a, c, g, or t
  misc_feature (1025)..(1025): n is a, c, g, or t
  misc_feature (1028)..(1029): n is a, c, g, or t
  misc_feature (1031)..(1031): n is a, c, g, or t
  misc_feature (1041)..(1041): n is a, c, g, or t
  misc_feature (1046)..(1046): n is a, c, g, or t
  misc_feature (1055)..(1055): n is a, c, g, or t
  misc_feature (1058)..(1059): n is a, c, g, or t
  misc_feature (1061)..(1062): n is a, c, g, or t
  misc_feature (1067)..(1067): n is a, c, g, or t
  misc_feature (1073)..(1073): n is a, c, g, or t
  misc_feature (1089)..(1089): n is a, c, g, or t
  misc_feature (1104)..(1104): n is a, c, g, or t
  misc_feature (1110)..(1111): n is a, c, g, or t
  misc_feature (1113)..(1113): n is a, c, g, or t
  misc_feature (1115)..(1115): n is a, c, g, or t
  misc_feature (1118)..(1118): n is a, c, g, or t
  misc_feature (1123)..(1123): n is a, c, g, or t
  misc_feature (1125)..(1125): n is a, c, g, or t
  misc_feature (1128)..(1128): n is a, c, g, or t
  misc_feature (1135)..(1135): n is a, c, g, or t
  misc_feature (1140)..(1141): n is a, c, g, or t
  misc_feature (1153)..(1153): n is a, c, g, or t
  misc_feature (1160)..(1160): n is a, c, g, or t
  misc_feature (1162)..(1162): n is a, c, g, or t
  misc_feature (1164)..(1164): n is a, c, g, or t
  misc_feature (1176)..(1176): n is a, c, g, or t
  misc_feature (1178)..(1178): n is a, c, g, or t
  misc_feature (1181)..(1182): n is a, c, g, or t
  misc_feature (1189)..(1189): n is a, c, g, or t
  misc_feature (1197)..(1197): n is a, c, g, or t
  misc_feature (1221)..(1223): n is a, c, g, or t
  misc_feature (1237)..(1237): n is a, c, g, or t
  misc_feature (1239)..(1240): n is a, c, g, or t
  misc_feature (1245)..(1246): n is a, c, g, or t
  misc_feature (1248)..(1248): n is a, c, g, or t
  misc_feature (1255)..(1255): n is a, c, g, or t
  misc_feature (1262)..(1263): n is a, c, g, or t
  misc_feature (1266)..(1267): n is a, c, g, or t
  misc_feature (1286)..(1286): n is a, c, g, or t
  misc_feature (1288)..(1288): n is a, c, g, or t
  misc_feature (1290)..(1290): n is a, c, g, or t
  misc_feature (1296)..(1296): n is a, c, g, or t
  misc_feature (1310)..(1310): n is a, c, g, or t
  misc_feature (1314)..(1314): n is a, c, g, or t
  misc_feature (1324)..(1324): n is a, c, g, or t
  misc_feature (1326)..(1326): n is a, c, g, or t
  misc_feature (1330)..(1331): n is a, c, g, or t
  misc_feature (1334)..(1336): n is a, c, g, or t
  misc_feature (1339)..(1341): n is a, c, g, or t
  misc_feature (1343)..(1343): n is a, c, g, or t
  misc_feature (1350)..(1350): n is a, c, g, or t
  misc_feature (1358)..(1358): n is a, c, g, or t
  misc_feature (1364)..(1365): n is a, c, g, or t
  misc_feature (1376)..(1376): n is a, c, g, or t
  misc_feature (1381)..(1381): n is a, c, g, or t
  misc_feature (1407)..(1407): n is a, c, g, or t
  misc_feature (1409)..(1409): n is a, c, g, or t
agagagattactatgagaggatcgcatcaccatcaccatcacggatcctatttaggtgacactatagaatcgtcgacccacgcgtccggtagttttctctgcgcgtgtgcgttttccctcctcccccgccctcagggtccacggccaccatggcgtattaggggcagcagtgcctgcggcagcattggcctttgcagcggcggcagcagcaccaggctctgcagcggcaacccccagcggcttaagccatggcgcttctcacggcattcagcagcagcgttgctgtaaccgacaaagacaccttcgaattaagcacattcctcgattccagcaaagcaccgcaacatgaccgaaatgagcttcctgagcagcgaggtgttggtgggggacttgatgtcccccttcgacccgtcgggtttgggggctgaagaaagcctaggtctcttagatgattacctggaggtggccaagcacttcaaacctcatgggttctccagcgacaaggctaaggcgggctcctccgaatggctggctgtggatgggttggtcagtccctccaacaacagcaaggaggatgccttctccgggacagattggatgttggagaaaatggatttgaaggagttcgacttggatgccctgttgggtatagatgacctggaaaccatgccagatgaccttctgaccacgttggatgacacttgtgatctctttgcccccctagtccaggagactaataagcagcccccccagacggtgaacccaattggccatctcccangaaagtttaacaaaacccgaccagggttgcccccttcacctttcttacaacctcttccccctttccccaggggtcctgtcctccactccaanatnattcctttanttaaaagcttggncaatgaaantggatatccactgaaaggaaantaggaaagccanaacaaanctgnttaagttgccntgantccctcagtgnataaangaagnaaaaaaccccctttcaaaaannnaaannggncatntgnnangaacccaaantcctnatctggggnttnntnnaaacnaacccntctaacaggggggttncccaaaaaaaacccnccccanncncnagnggttntntgngggtttnccccnnccaaaactttanaaacctncngnaaaaaaaaaagnanacnncaaaaanaaaggggnaaaaatgaataaaaacttaaaaannnacaaaaaaaacaancnnccctnnanacccccnaaaaaannggnnaaagaagttctttaagggnangnaaaaantgaaaaaaaaaagntctnaaaaaagggnancccnnccnnnaannncntcaaaanttaaaaanaccccnngagggaaaaanccccnttaaaaaaaaaaacattgtttaaaangna

SEQ ID NO: 357 - DNA, 1425 bp, Homo Sapiens
  misc_feature (789)..(789): n is a, c, g, or t
  misc_feature (794)..(794): n is a, c, g, or t
  misc_feature (874)..(874): n is a, c, g, or t
  misc_feature (885)..(885): n is a, c, g, or t
  misc_feature (923)..(923): n is a, c, g, or t
  misc_feature (925)..(925): n is a, c, g, or t
  misc_feature (939)..(940): n is a, c, g, or t
  misc_feature (945)..(945): n is a, c, g, or t
  misc_feature (949)..(949): n is a, c, g, or t
  misc_feature (969)..(969): n is a, c, g, or t
  misc_feature (989)..(989): n is a, c, g, or t
  misc_feature (1014)..(1015): n is a, c, g, or t
  misc_feature (1021)..(1021): n is a, c, g, or t
  misc_feature (1036)..(1036): n is a, c, g, or t
  misc_feature (1039)..(1039): n is a, c, g, or t
  misc_feature (1061)..(1061): n is a, c, g, or t
  misc_feature (1065)..(1065): n is a, c, g, or t
  misc_feature (1067)..(1067): n is a, c, g, or t
  misc_feature (1079)..(1079): n is a, c, g, or t
  misc_feature (1088)..(1088): n is a, c, g, or t
  misc_feature (1096)..(1096): n is a, c, g, or t
  misc_feature (1114)..(1114): n is a, c, g, or t
  misc_feature (1118)..(1118): n is a, c, g, or t
  misc_feature (1123)..(1123): n is a, c, g, or t
  misc_feature (1135)..(1135): n is a, c, g, or t
  misc_feature (1138)..(1139): n is a, c, g, or t
  misc_feature (1142)..(1142): n is a, c, g, or t
  misc_feature (1154)..(1154): n is a, c, g, or t
  misc_feature (1156)..(1156): n is a, c, g, or t
  misc_feature (1175)..(1175): n is a, c, g, or t
  misc_feature (1179)..(1180): n is a, c, g, or t
  misc_feature (1182)..(1182): n is a, c, g, or t
  misc_feature (1194)..(1194): n is a, c, g, or t
  misc_feature (1198)..(1198): n is a, c, g, or t
  misc_feature (1208)..(1208): n is a, c, g, or t
  misc_feature (1213)..(1213): n is a, c, g, or t
  misc_feature (1219)..(1219): n is a, c, g, or t
  misc_feature (1222)..(1224): n is a, c, g, or t
  misc_feature (1232)..(1232): n is a, c, g, or t
  misc_feature (1234)..(1235): n is a, c, g, or t
  misc_feature (1246)..(1246): n is a, c, g, or t
  misc_feature (1266)..(1267): n is a, c, g, or t
  misc_feature (1272)..(1272): n is a, c, g, or t
  misc_feature (1279)..(1281): n is a, c, g, or t
  misc_feature (1284)..(1285): n is a, c, g, or t
  misc_feature (1288)..(1288): n is a, c, g, or t
  misc_feature (1293)..(1293): n is a, c, g, or t
  misc_feature (1297)..(1297): n is a, c, g, or t
  misc_feature (1301)..(1301): n is a, c, g, or t
  misc_feature (1312)..(1313): n is a, c, g, or t
  misc_feature (1315)..(1315): n is a, c, g, or t
  misc_feature (1331)..(1331): n is a, c, g, or t
  misc_feature (1333)..(1333): n is a, c, g, or t
  misc_feature (1340)..(1340): n is a, c, g, or t
  misc_feature (1353)..(1353): n is a, c, g, or t
  misc_feature (1360)..(1360): n is a, c, g, or t
  misc_feature (1369)..(1369): n is a, c, g, or t
  misc_feature (1371)..(1371): n is a, c, g, or t
  misc_feature (1378)..(1378): n is a, c, g, or t
  misc_feature (1391)..(1391): n is a, c, g, or t
  misc_feature (1394)..(1394): n is a, c, g, or t
  misc_feature (1396)..(1396): n is a, c, g, or t
  misc_feature (1414)..(1414): n is a, c, g, or t
  misc_feature (1418)..(1418): n is a, c, g, or t
  misc_feature (1422)..(1422): n is a, c, g, or t
  misc_feature (1424)..(1424): n is a, c, g, or t
agagagattactatgagaggatcgcatcaccatcaccatcacggatcctatttaggtgacactatagaatcgtcgacccacgcgtccgcggggacgcggagcaggtggccgcggcggggcagctgggccgccagcttggtgcctcggggaccgtctcccgctgctttggtcaccagcccctgcccgcccgacccgctccgttctccggcctgcgagccctgccggccggactttgcgccgcgtccggcgctgctgctgcgctcggggccccgctcggcgccggcggtgaccgggaagcccgcgttaaaggggcaaccgggaccctggcccggtatggctgaagtcagcatcgaccagtccaagctgcctggagtcaaggaagtatgccgagattttgctgtcctggaggaccacaccctggctcacagcctgcaggaacaagagattgagcatcatttggcatcgaacgttcagcggaaccgtttggtccagcatgatctccaggtggctaagcagctccaagaggaagatctgaaagcgcaggcccagctccagaagcgctacaaagaccttgaacaacaagactgtgaaattgctcaggaaattcaggagaagctggctattgaggcagagagacgacgcattcaggagaagaaggatgaggacatagctcgccttttgcaagaaaaggagttacaggaagagaaaaagagaaagaaacactttccagagttccctgcaacccgtgcttatgcagatagttactattatgaagatggaggaatgaanccaanagtgatgaaaagaaactgtatctactccatcacgaatggcccacaagggatcaggaatgttatgatgctgaaattgccanaaaactgcaanaaaagaaaaactttttggctacccaagttggacatganancccgctcaagtaanntcaangatnaaagaaatcgctcgactttntaatggcttgaaagaaaaanaaaactttacaaaaaacccaagganncggganaaaatcttcttttgnaanaaaaaaaacaaaaccccaagtnaaancnaaaaaagctaangaacaaatnccaagtcnaaaaaaaaggataaaccncccnttccnaaaagaaaggcnacnncgncccccccccctntnttaaaaaaggtaaaaatcngaannanctctttttaaancaanaaaattcaangggantttttnaannnaaaacctntnnaaagttttatnaaaatttaaaaccaaaaacnnccttnaaaaggnnnctnnaanaaatntatngggnaaaaaaaaaannanccttattttttcccgngntgtcccngaatttccccagnttttaanaaaaatatntntttcaantttttataacccnggnanaaaaaatctaaaaacccnctcntaantng

SEQ ID NO: 358 - DNA, 1520 bp, Homo Sapiens
  misc_feature (437)..(437): n is a, c, g, or t
  misc_feature (439)..(439): n is a, c, g, or t
  misc_feature (478)..(478): n is a, c, g, or t
  misc_feature (481)..(481): n is a, c, g, or t
  misc_feature (488)..(488): n is a, c, g, or t
  misc_feature (502)..(502): n is a, c, g, or t
  misc_feature (531)..(531): n is a, c, g, or t
  misc_feature (536)..(536): n is a, c, g, or t
  misc_feature (538)..(539): n is a, c, g, or t
  misc_feature (550)..(550): n is a, c, g, or t
  misc_feature (552)..(552): n is a, c, g, or t
  misc_feature (554)..(554): n is a, c, g, or t
  misc_feature (561)..(561): n is a, c, g, or t
  misc_feature (563)..(563): n is a, c, g, or t
  misc_feature (565)..(566): n is a, c, g, or t
  misc_feature (570)..(570): n is a, c, g, or t
  misc_feature (584)..(584): n is a, c, g, or t
  misc_feature (588)..(588): n is a, c, g, or t
  misc_feature (594)..(594): n is a, c, g, or t
  misc_feature (606)..(606): n is a, c, g, or t
  misc_feature (609)..(609): n is a, c, g, or t
  misc_feature (612)..(613): n is a, c, g, or t
  misc_feature (615)..(616): n is a, c, g, or t
  misc_feature (618)..(618): n is a, c, g, or t
  misc_feature (624)..(624): n is a, c, g, or t
  misc_feature (627)..(627): n is a, c, g, or t
  misc_feature (631)..(631): n is a, c, g, or t
  misc_feature (637)..(637): n is a, c, g, or t
  misc_feature (645)..(645): n is a, c, g, or t
  misc_feature (648)..(648): n is a, c, g, or t
  misc_feature (651)..(651): n is a, c, g, or t
  misc_feature (658)..(658): n is a, c, g, or t
  misc_feature (661)..(663): n is a, c, g, or t
  misc_feature (668)..(669): n is a, c, g, or t
  misc_feature (672)..(672): n is a, c, g, or t
  misc_feature (674)..(674): n is a, c, g, or t
  misc_feature (677)..(677): n is a, c, g, or t
  misc_feature (701)..(701): n is a, c, g, or t
  misc_feature (705)..(705): n is a, c, g, or t
  misc_feature (713)..(713): n is a, c, g, or t
  misc_feature (715)..(715): n is a, c, g, or t
  misc_feature (717)..(717): n is a, c, g, or t
  misc_feature (720)..(720): n is a, c, g, or t
  misc_feature (723)..(724): n is a, c, g, or t
  misc_feature (729)..(729): n is a, c, g, or t
  misc_feature (735)..(735): n is a, c, g, or t
  misc_feature (737)..(738): n is a, c, g, or t
  misc_feature (740)..(740): n is a, c, g, or t
  misc_feature (744)..(748): n is a, c, g, or t
  misc_feature (754)..(754): n is a, c, g, or t
  misc_feature (756)..(756): n is a, c, g, or t
  misc_feature (761)..(763): n is a, c, g, or t
  misc_feature (772)..(772): n is a, c, g, or t
  misc_feature (780)..(780): n is a, c, g, or t
  misc_feature (788)..(789): n is a, c, g, or t
  misc_feature (792)..(792): n is a, c, g, or t
  misc_feature (794)..(794): n is a, c, g, or t
  misc_feature (797)..(798): n is a, c, g, or t
  misc_feature (802)..(802): n is a, c, g, or t
  misc_feature (804)..(806): n is a, c, g, or t
  misc_feature (819)..(819): n is a, c, g, or t
  misc_feature (832)..(832): n is a, c, g, or t
  misc_feature (839)..(839): n is a, c, g, or t
  misc_feature (848)..(848): n is a, c, g, or t
  misc_feature (853)..(853): n is a, c, g, or t
  misc_feature (860)..(860): n is a, c, g, or t
  misc_feature (863)..(866): n is a, c, g, or t
  misc_feature (868)..(868): n is a, c, g, or t
  misc_feature (871)..(871): n is a, c, g, or t
  misc_feature (875)..(875): n is a, c, g, or t
  misc_feature (882)..(882): n is a, c, g, or t
  misc_feature (886)..(886): n is a, c, g, or t
  misc_feature (894)..(894): n is a, c, g, or t
  misc_feature (896)..(896): n is a, c, g, or t
  misc_feature (910)..(911): n is a, c, g, or t
  misc_feature (916)..(916): n is a, c, g, or t
  misc_feature (919)..(922): n is a, c, g, or t
  misc_feature (927)..(927): n is a, c, g, or t
  misc_feature (929)..(929): n is a, c, g, or t
  misc_feature (931)..(931): n is a, c, g, or t
  misc_feature (938)..(940): n is a, c, g, or t
  misc_feature (942)..(942): n is a, c, g, or t
  misc_feature (945)..(946): n is a, c, g, or t
  misc_feature (952)..(952): n is a, c, g, or t
  misc_feature (960)..(960): n is a, c, g, or t
  misc_feature (967)..(970): n is a, c, g, or t
  misc_feature (972)..(972): n is a, c, g, or t
  misc_feature (974)..(974): n is a, c, g, or t
  misc_feature (979)..(979): n is a, c, g, or t
  misc_feature (981)..(982): n is a, c, g, or t
  misc_feature (986)..(988): n is a, c, g, or t
  misc_feature (990)..(990): n is a, c, g, or t
  misc_feature (992)..(993): n is a, c, g, or t
  misc_feature (1003)..(1003): n is a, c, g, or t
  misc_feature (1006)..(1006): n is a, c, g, or t
  misc_feature (1008)..(1008): n is a, c, g, or t
  misc_feature (1024)..(1027): n is a, c, g, or t
  misc_feature (1030)..(1030): n is a, c, g, or t
  misc_feature (1036)..(1038): n is a, c, g, or t
  misc_feature (1044)..(1044): n is a, c, g, or t
  misc_feature (1047)..(1048): n is a, c, g, or t
  misc_feature (1050)..(1050): n is a, c, g, or t
  misc_feature (1052)..(1053): n is a, c, g, or t
  misc_feature (1056)..(1057): n is a, c, g, or t
  misc_feature (1067)..(1067): n is a, c, g, or t
  misc_feature (1070)..(1070): n is a, c, g, or t
  misc_feature (1074)..(1074): n is a, c, g, or t
  misc_feature (1076)..(1076): n is a, c, g, or t
  misc_feature (1078)..(1079): n is a, c, g, or t
  misc_feature (1083)..(1083): n is a, c, g, or t
  misc_feature (1091)..(1091): n is a, c, g, or t
  misc_feature (1093)..(1094): n is a, c, g, or t
  misc_feature (1097)..(1097): n is a, c, g, or t
  misc_feature (1103)..(1104): n is a, c, g, or t
  misc_feature (1106)..(1106): n is a, c, g, or t
  misc_feature (1108)..(1108): n is a, c, g, or t
  misc_feature (1110)..(1110): n is a, c, g, or t
  misc_feature (1114)..(1115): n is a, c, g, or t
  misc_feature (1129)..(1134): n is a, c, g, or t
  misc_feature (1138)..(1138): n is a, c, g, or t
  misc_feature (1141)..(1141): n is a, c, g, or t
  misc_feature (1144)..(1144): n is a, c, g, or t
  misc_feature (1146)..(1146): n is a, c, g, or t
  misc_feature (1150)..(1150): n is a, c, g, or t
  misc_feature (1152)..(1152): n is a, c, g, or t
  misc_feature (1159)..(1160): n is a, c, g, or t
  misc_feature (1163)..(1165): n is a, c, g, or t
  misc_feature (1168)..(1169): n is a, c, g, or t
  misc_feature (1171)..(1171): n is a, c, g, or t
  misc_feature (1177)..(1177): n is a, c, g, or t
  misc_feature (1184)..(1184): n is a, c, g, or t
  misc_feature (1201)..(1201): n is a, c, g, or t
  misc_feature (1205)..(1205): n is a, c, g, or t
  misc_feature (1207)..(1208): n is a, c, g, or t
  misc_feature (1212)..(1216): n is a, c, g, or t
  misc_feature (1220)..(1220): n is a, c, g, or t
  misc_feature (1223)..(1223): n is a, c, g, or t
  misc_feature (1229)..(1230): n is a, c, g, or t
  misc_feature (1233)..(1233): n is a, c, g, or t
  misc_feature (1235)..(1235): n is a, c, g, or t
  misc_feature (1237)..(1238): n is a, c, g, or t
  misc_feature (1247)..(1249): n is a, c, g, or t
  misc_feature (1251)..(1254): n is a, c, g, or t
  misc_feature (1256)..(1256): n is a, c, g, or t
  misc_feature (1261)..(1261): n is a, c, g, or t
  misc_feature (1273)..(1273): n is a, c, g, or t
  misc_feature (1281)..(1281): n is a, c, g, or t
  misc_feature (1284)..(1285): n is a, c, g, or t
  misc_feature (1290)..(1290): n is a, c, g, or t
  misc_feature (1292)..(1292): n is a, c, g, or t
  misc_feature (1294)..(1296): n is a, c, g, or t
  misc_feature (1299)..(1299): n is a, c, g, or t
  misc_feature (1308)..(1308): n is a, c, g, or t
  misc_feature (1317)..(1317): n is a, c, g, or t
  misc_feature (1321)..(1321): n is a, c, g, or t
  misc_feature (1323)..(1325): n is a, c, g, or t
  misc_feature (1328)..(1328): n is a, c, g, or t
  misc_feature (1342)..(1345): n is a, c, g, or t
  misc_feature (1347)..(1347): n is a, c, g, or t
  misc_feature (1352)..(1352): n is a, c, g, or t
  misc_feature (1354)..(1354): n is a, c, g, or t
  misc_feature (1364)..(1364): n is a, c, g, or t
  misc_feature (1366)..(1366): n is a, c, g, or t
  misc_feature (1369)..(1370): n is a, c, g, or t
  misc_feature (1377)..(1377): n is a, c, g, or t
  misc_feature (1389)..(1389): n is a, c, g, or t
  misc_feature (1391)..(1391): n is a, c, g, or t
  misc_feature (1393)..(1393): n is a, c, g, or t
  misc_feature (1406)..(1410): n is a, c, g, or t
  misc_feature (1415)..(1416): n is a, c, g, or t
  misc_feature (1418)..(1418): n is a, c, g, or t
  misc_feature (1420)..(1421): n is a, c, g, or t
  misc_feature (1424)..(1425): n is a, c, g, or t
  misc_feature (1427)..(1429): n is a, c, g, or t
  misc_feature (1440)..(1441): n is a, c, g, or t
  misc_feature (1445)..(1448): n is a, c, g, or t
  misc_feature (1452)..(1452): n is a, c, g, or t
  misc_feature (1454)..(1454): n is a, c, g, or t
  misc_feature (1456)..(1456): n is a, c, g, or t
  misc_feature (1463)..(1463): n is a, c, g, or t
  misc_feature (1468)..(1468): n is a, c, g, or t
  misc_feature (1470)..(1470): n is a, c, g, or t
  misc_feature (1473)..(1473): n is a, c, g, or t
  misc_feature (1475)..(1475): n is a, c, g, or t
  misc_feature (1478)..(1480): n is a, c, g, or t
  misc_feature (1485)..(1485): n is a, c, g, or t
  misc_feature (1488)..(1488): n is a, c, g, or t
  misc_feature (1490)..(1491): n is a, c, g, or t
  misc_feature (1495)..(1497): n is a, c, g, or t
  misc_feature (1500)..(1500): n is a, c, g, or t
  misc_feature (1503)..(1503): n is a, c, g, or t
  misc_feature (1508)..(1509): n is a, c, g, or t
  misc_feature (1511)..(1511): n is a, c, g, or t
  misc_feature (1513)..(1513): n is a, c, g, or t
  misc_feature (1515)..(1515): n is a, c, g, or t
agagagaattactatgagaggatcgcatcaccatcaccatcacggatcctatttaggtgacactatagaatcgtcgacccacgcggtccgcaaggattgacacgtcctgcctgaccaccatcctgccaccaccttctcttctcttgtcactagggggactagggggtccccaaagtggcccactttctgtggctctgatcagcgcaggggccagccagggacatagccagggaggggccacatcacttcccactggaaatctctgtggtctgcaagtgcttcccagcccagaacaggggtggattccccaacctcaacctcctttcttctctgctcccaaaccatgtcaggaccaccttcctctagagctcgggagcccggaagggtcttcacccactcctactccagtatcagctggcacgggctcccttcctganancaaagggtcaaaggacccccttctgtgaaggctcaacanagntggggantcccaaggcccccnttccgggcccccttcccttgcccttccanttaangnnaaaaaaccttntncntttcccngngnngaanaaagggcccaaaanggtnccaggncatccccaaagntcnaanngnngnaagggnccncaancccccnttttttgngtntgnccaaagnaannnaaaannccnanggnaaaatttttgggggaaaaaaaggnctcnccttgggncntnctnggnngaaantttttngnngncccnnnnnctcccngnggttnnngaaaaaatnccccgggnaagggggnnaananaanntttngnnntccgggggccccnttttaaaattttnaaaaaanggggttttncaaanccccccnaannnntnctnaatnttttgtntttngcaaaaananaaaaaaaaaaaganncctcntcnnnnttttntngngaaaaannngnttnnttggtngggggggnaaaaaannnnananggccntnntatnnnantnnaaaaaaaganggncncccccccaattttttnnnnagnaggaannntccccnttnncntnnaannaaaagggtcntgngatntncnnaaanaaaaaaanannaanaaattnntnanangggnngggcccccccctcnnnnnngggnacnttnanaaantnttttatnnaannngtnntnccaccntttgaanaaaaaccaaaaaaaagnaccncnnaaannnnncttngtntttttnnaanananncccttttcnnngnnnngngtttnttttttttaaanaaaaaaanaannttttntnannnatnttttttatntcaataggnactncnnnaanaaaaaaaatttgtnnnnanaatancntgataaaatntntannaataaanaaaaaaaatatntntnatatacttaactnnnnnattannanannaannannnaatcaaaattnnaaannnntctnananaaaaaanaaaananaananatnnnctctnaananntttnnnctntanaatannantnantaata

SEQ ID NO: 359 - DNA, 1415 bp, Homo Sapiens
  misc_feature (787)..(787): n is a, c, g, or t
  misc_feature (796)..(796): n is a, c, g, or t
  misc_feature (800)..(800): n is a, c, g, or t
  misc_feature (818)..(818): n is a, c, g, or t
  misc_feature (834)..(834): n is a, c, g, or t
  misc_feature (841)..(841): n is a, c, g, or t
  misc_feature (853)..(853): n is a, c, g, or t
  misc_feature (883)..(883): n is a, c, g, or t
  misc_feature (887)..(887): n is a, c, g, or t
  misc_feature (904)..(904): n is a, c, g, or t
  misc_feature (910)..(911): n is a, c, g, or t
  misc_feature (927)..(927): n is a, c, g, or t
  misc_feature (937)..(937): n is a, c, g, or t
  misc_feature (939)..(939): n is a, c, g, or t
  misc_feature (944)..(944): n is a, c, g, or t
  misc_feature (955)..(957): n is a, c, g, or t
  misc_feature (990)..(990): n is a, c, g, or t
  misc_feature (994)..(994): n is a, c, g, or t
  misc_feature (999)..(999): n is a, c, g, or t
  misc_feature (1007)..(1009): n is a, c, g, or t
  misc_feature (1011)..(1011): n is a, c, g, or t
  misc_feature (1013)..(1013): n is a, c, g, or t
  misc_feature (1018)..(1019): n is a, c, g, or t
  misc_feature (1023)..(1023): n is a, c, g, or t
  misc_feature (1035)..(1035): n is a, c, g, or t
  misc_feature (1038)..(1038): n is a, c, g, or t
  misc_feature (1043)..(1043): n is a, c, g, or t
  misc_feature (1053)..(1054): n is a, c, g, or t
  misc_feature (1057)..(1058): n is a, c, g, or t
  misc_feature (1066)..(1066): n is a, c, g, or t
  misc_feature (1069)..(1069): n is a, c, g, or t
  misc_feature (1074)..(1074): n is a, c, g, or t
  misc_feature (1078)..(1078): n is a, c, g, or t
  misc_feature (1082)..(1084): n is a, c, g, or t
  misc_feature (1089)..(1089): n is a, c, g, or t
  misc_feature (1098)..(1099): n is a, c, g, or t
  misc_feature (1101)..(1102): n is a, c, g, or t
  misc_feature (1117)..(1118): n is a, c, g, or t
  misc_feature (1121)..(1121): n is a, c, g, or t
  misc_feature (1125)..(1125): n is a, c, g, or t
  misc_feature (1135)..(1135): n is a, c, g, or t
  misc_feature (1138)..(1139): n is a, c, g, or t
  misc_feature (1141)..(1142): n is a, c, g, or t
  misc_feature (1144)..(1144): n is a, c, g, or t
  misc_feature (1146)..(1146): n is a, c, g, or t
  misc_feature (1149)..(1149): n is a, c, g, or t
  misc_feature (1152)..(1152): n is a, c, g, or t
  misc_feature (1154)..(1154): n is a, c, g, or t
  misc_feature (1156)..(1157): n is a, c, g, or t
  misc_feature (1159)..(1159): n is a, c, g, or t
  misc_feature (1164)..(1164): n is a, c, g, or t
  misc_feature (1174)..(1174): n is a, c, g, or t
  misc_feature (1181)..(1181): n is a, c, g, or t
  misc_feature (1185)..(1185): n is a, c, g, or t
  misc_feature (1190)..(1190): n is a, c, g, or t
  misc_feature (1198)..(1200): n is a, c, g, or t
  misc_feature (1204)..(1204): n is a, c, g, or t
  misc_feature (1212)..(1214): n is a, c, g, or t
  misc_feature (1217)..(1218): n is a, c, g, or t
  misc_feature (1223)..(1223): n is a, c, g, or t
  misc_feature (1228)..(1228): n is a, c, g, or t
  misc_feature (1230)..(1230): n is a, c, g, or t
  misc_feature (1236)..(1237): n is a, c, g, or t
  misc_feature (1239)..(1240): n is a, c, g, or t
  misc_feature (1242)..(1243): n is a, c, g, or t
  misc_feature (1249)..(1250): n is a, c, g, or t
  misc_feature (1252)..(1252): n is a, c, g, or t
  misc_feature (1255)..(1255): n is a, c, g, or t
  misc_feature (1257)..(1257): n is a, c, g, or t
  misc_feature (1259)..(1259): n is a, c, g, or t
  misc_feature (1262)..(1262): n is a, c, g, or t
  misc_feature (1268)..(1268): n is a, c, g, or t
  misc_feature (1272)..(1273): n is a, c, g, or t
  misc_feature (1275)..(1275): n is a, c, g, or t
  misc_feature (1281)..(1281): n is a, c, g, or t
  misc_feature (1283)..(1283): n is a, c, g, or t
  misc_feature (1286)..(1286): n is a, c, g, or t
  misc_feature (1288)..(1288): n is a, c, g, or t
  misc_feature (1293)..(1296): n is a, c, g, or t
  misc_feature (1300)..(1302): n is a, c, g, or t
  misc_feature (1305)..(1305): n is a, c, g, or t
  misc_feature (1307)..(1308): n is a, c, g, or t
  misc_feature (1310)..(1313): n is a, c, g, or t
  misc_feature (1315)..(1316): n is a, c, g, or t
  misc_feature (1319)..(1319): n is a, c, g, or t
  misc_feature (1322)..(1322): n is a, c, g, or t
  misc_feature (1324)..(1327): n is a, c, g, or t
  misc_feature (1329)..(1332): n is a, c, g, or t
  misc_feature (1335)..(1335): n is a, c, g, or t
  misc_feature (1337)..(1339): n is a, c, g, or t
  misc_feature (1341)..(1341): n is a, c, g, or t
  misc_feature (1345)..(1345): n is a, c, g, or t
  misc_feature (1347)..(1350): n is a, c, g, or t
  misc_feature (1352)..(1352): n is a, c, g, or t
  misc_feature (1354)..(1354): n is a, c, g, or t
  misc_feature (1357)..(1357): n is a, c, g, or t
  misc_feature (1360)..(1361): n is a, c, g, or t
  misc_feature (1365)..(1365): n is a, c, g, or t
  misc_feature (1367)..(1367): n is a, c, g, or t
  misc_feature (1374)..(1375): n is a, c, g, or t
  misc_feature (1379)..(1379): n is a, c, g, or t
  misc_feature (1381)..(1381): n is a, c, g, or t
  misc_feature (1383)..(1386): n is a, c, g, or t
  misc_feature (1398)..(1398): n is a, c, g, or t
  misc_feature (1402)..(1402): n is a, c, g, or t
  misc_feature (1413)..(1413): n is a, c, g, or t
caatagagaaattactatgagaggatcgcatcaccatcaccatcacgggatcctatttaggtgacactatagaatcgtcgacccacgcgatccgccggctcgcgcggccccggcgccccacgcgcgcgcgtcgttctcccgcccgctcgctccccggcgctcacacctgagctcactcgcgcacgcccgcccggcccgagaaccgcgccgccgcctcggccccgcggaagccccgccgcgccatgtcttcgcctcccgaagggaaactagagactaaagctggacacccgcccgccgtgaaagctggtggaatgcgaattgtgcagaaacacccacatacaggagacaccaaagaagagaaagacaaggatgaccaggaatgggaaagccccagtccacctaaacccactgtgttcatctctggggtcatcgcccggggtgacaaagatttccccccggcggctgcgcaggtggctcaccagaagccgcatgcctccatggacaagcatccttccccaagaacccagcacatccagcagccacgcaagtgagcctggagtccaccagcctgccccatggccccggctctgctgcacttggtatttccctgacagagagaaccagcagtttcgcccaaatcctactctgctgggaaatctaaggcaaaaccaagtgctctgtcctttgccttaaatttccatatttaaaactagaaacagctccagcccaaaccttgtttatggggagtctggttggatgtcatttgaggatcatttgtgcccctaanaggtgccanttancagaattttgccaagatncgaaaaaaaattttancttttanttctatttcaanaagtcaaccttgaacgttccctggtctatngttntttaaaaaaaaaaaaangcacanntttttgaaaaaaaatnaaaatttaangntttangaaaaaaaccnnnaatcatttgcattgcttttttaaaaaatgggcnaatnaaaantctcaaannncntntgganngaanaaaaaacttaanggnaattnaattttgggnnggnncccttatnaanggaantttnaaannncaggnaaaaataanngnnaaatttccctttttnntanaaangggagaaatnttnngnnantnttnatnangnncnctttnaaaaaaatcnaaaaaantttnttttntaaaaaannncctnttaatttnnnaanntttanatatntnaaaaannanntnnaaaaannanttntnanaanaaaatntttnntntatttntntananaatannnnattnnnttntnntnnnntnntanttntnnnntnnnntanannntntttnannnntntnctntanntttnanttttttnntatntncnnnntataaaaaaatnttantttttttgtanat

SEQ ID NO: 360 - DNA, 1345 bp, Homo Sapiens
  misc_feature (929)..(929): n is a, c, g, or t
  misc_feature (937)..(937): n is a, c, g, or t
  misc_feature (940)..(940): n is a, c, g, or t
  misc_feature (960)..(960): n is a, c, g, or t
  misc_feature (984)..(984): n is a, c, g, or t
  misc_feature (1002)..(1002): n is a, c, g, or t
  misc_feature (1036)..(1036): n is a, c, g, or t
  misc_feature (1045)..(1045): n is a, c, g, or t
  misc_feature (1056)..(1056): n is a, c, g, or t
  misc_feature (1059)..(1059): n is a, c, g, or t
  misc_feature (1064)..(1064): n is a, c, g, or t
  misc_feature (1070)..(1070): n is a, c, g, or t
  misc_feature (1090)..(1090): n is a, c, g, or t
  misc_feature (1093)..(1093): n is a, c, g, or t
  misc_feature (1099)..(1099): n is a, c, g, or t
  misc_feature (1103)..(1103): n is a, c, g, or t
  misc_feature (1109)..(1111): n is a, c, g, or t
  misc_feature (1113)..(1113): n is a, c, g, or t
  misc_feature (1144)..(1144): n is a, c, g, or t
  misc_feature (1148)..(1150): n is a, c, g, or t
  misc_feature (1157)..(1157): n is a, c, g, or t
  misc_feature (1164)..(1164): n is a, c, g, or t
  misc_feature (1173)..(1173): n is a, c, g, or t
  misc_feature (1181)..(1181): n is a, c, g, or t
  misc_feature (1189)..(1189): n is a, c, g, or t
  misc_feature (1195)..(1195): n is a, c, g, or t
  misc_feature (1208)..(1209): n is a, c, g, or t
  misc_feature (1214)..(1215): n is a, c, g, or t
  misc_feature (1219)..(1220): n is a, c, g, or t
  misc_feature (1223)..(1223): n is a, c, g, or t
  misc_feature (1239)..(1239): n is a, c, g, or t
  misc_feature (1253)..(1254): n is a, c, g, or t
  misc_feature (1259)..(1261): n is a, c, g, or t
  misc_feature (1265)..(1270): n is a, c, g, or t
  misc_feature (1274)..(1274): n is a, c, g, or t
  misc_feature (1276)..(1280): n is a, c, g, or t
  misc_feature (1286)..(1286): n is a, c, g, or t
  misc_feature (1298)..(1298): n is a, c, g, or t
  misc_feature (1303)..(1304): n is a, c, g, or t
  misc_feature (1306)..(1306): n is a, c, g, or t
  misc_feature (1309)..(1311): n is a, c, g, or t
  misc_feature (1314)..(1315): n is a, c, g, or t
  misc_feature (1317)..(1319): n is a, c, g, or t
  misc_feature (1322)..(1323): n is a, c, g, or t
  misc_feature (1325)..(1326): n is a, c, g, or t
  misc_feature (1328)..(1328): n is a, c, g, or t
  misc_feature (1338)..(1338): n is a, c, g, or t
  misc_feature (1345)..(1345): n is a, c, g, or t
aatagagaaattactatggagaggatcgcatcaccatcaccatcacggatcctatttaggtgacactatagaatcgtcgacccacgcgtccgcggacgcgtgggcttcaactcctgttggctctcctccatctctctcagcaggcacagctgtttggtctagaaatggaggacaggcctcatcgtctcctaattatgaaggacccttacactctttgcaaagccgaattgaagatcgtttagaaagactggatgatgctattcatgttctccggaaccatgcagtgggcccatccacagctatgcctggtggtcatggggacatgcatggaatcattggaccttctcataatggagccatgggtggtctgggctcagggtatggaaccggccttctttcagccaacagacattcactcatggtggggacccatcgtgaagatggcgtggccctgagaggcagccattctcttctgccaaaccaggttccggttccacagcttcctgtccagtctgcgacttcccctgacctgaacccaccccaggacccttacagaggcatgccaccaggactacaggggcagagtgtctcctctggcagctctgagatcaaatccgatgacgagggtgatgagaacctgcaagacacgaaatcttcggaggacaagaaattagatgacgacaagaaggatatcaaatcaattactagcaataatgacgatgaggacctgacaccagagcagaaggcagagcgtgagaaggagcggaggatggccaacaatgcccgagagcgtctgcgggtccgtgacatcaacgaggctttcaaagagctcggccgcatggtgcagctccacctcaagagtgacaagccccaaaccaagctcctgatcctccaccaggcggtggccgtcatcctcagtctggaaacancaagtccnaanaaaaggaaatctgaattccnaaagctgccgtgtctgaaaaaaanggaaggaaaaaaaagggntcctcgaaccctcccccctctctccttggccggnccaaacccntggaaaggganaancatcnaaatcncatggggaaaaaagtaaaanggncccaanttgncccaannncnttattaaaaaaaaaaacccctttcttaaaancttnnnttatttnaaacccnaaaaaaacntttccctnaacccccntttttnaaaaaaaaaaaanntaaanntttnnaancccaaaccaaaggttncccttccctttttnnaaacnnnaaannnnnnaaanannnnngggggncccccccccaanggggnnanaannntanntnnnaanngnncncggtaaaaancaaaaan

SEQ ID NO: 361 - DNA, 1399 bp, Homo Sapiens
  misc_feature (7)..(7): n is a, c, g, or t
  misc_feature (341)..(341): n is a, c, g, or t
  misc_feature (348)..(348): n is a, c, g, or t
  misc_feature (356)..(356): n is a, c, g, or t
  misc_feature (362)..(362): n is a, c, g, or t
  misc_feature (374)..(374): n is a, c, g, or t
  misc_feature (403)..(403): n is a, c, g, or t
  misc_feature (415)..(415): n is a, c, g, or t
  misc_feature (421)..(421): n is a, c, g, or t
  misc_feature (441)..(441): n is a, c, g, or t
  misc_feature (453)..(453): n is a, c, g, or t
  misc_feature (468)..(468): n is a, c, g, or t
  misc_feature (475)..(475): n is a, c, g, or t
  misc_feature (481)..(483): n is a, c, g, or t
  misc_feature (487)..(487): n is a, c, g, or t
  misc_feature (492)..(493): n is a, c, g, or t
  misc_feature (505)..(506): n is a, c, g, or t
  misc_feature (521)..(521): n is a, c, g, or t
  misc_feature (537)..(537): n is a, c, g, or t
  misc_feature (547)..(547): n is a, c, g, or t
  misc_feature (564)..(564): n is a, c, g, or t
  misc_feature (572)..(572): n is a, c, g, or t
  misc_feature (574)..(575): n is a, c, g, or t
  misc_feature (579)..(579): n is a, c, g, or t
  misc_feature (594)..(595): n is a, c, g, or t
  misc_feature (597)..(597): n is a, c, g, or t
  misc_feature (601)..(601): n is a, c, g, or t
  misc_feature (613)..(613): n is a, c, g, or t
  misc_feature (615)..(615): n is a, c, g, or t
  misc_feature (619)..(619): n is a, c, g, or t
  misc_feature (628)..(628): n is a, c, g, or t
  misc_feature (632)..(632): n is a, c, g, or t
  misc_feature (642)..(642): n is a, c, g, or t
  misc_feature (645)..(646): n is a, c, g, or t
  misc_feature (649)..(651): n is a, c, g, or t
  misc_feature (653)..(655): n is a, c, g, or t
  misc_feature (659)..(661): n is a, c, g, or t
  misc_feature (666)..(666): n is a, c, g, or t
  misc_feature (673)..(673): n is a, c, g, or t
  misc_feature (683)..(683): n is a, c, g, or t
  misc_feature (697)..(698): n is a, c, g, or t
  misc_feature (716)..(716): n is a, c, g, or t
  misc_feature (728)..(728): n is a, c, g, or t
  misc_feature (735)..(736): n is a, c, g, or t
  misc_feature (750)..(750): n is a, c, g, or t
  misc_feature (754)..(755): n is a, c, g, or t
  misc_feature (766)..(766): n is a, c, g, or t
  misc_feature (772)..(772): n is a, c, g, or t
  misc_feature (774)..(774): n is a, c, g, or t
  misc_feature (776)..(777): n is a, c, g, or t
  misc_feature (779)..(779): n is a, c, g, or t
  misc_feature (803)..(803): n is a, c, g, or t
  misc_feature (819)..(819): n is a, c, g, or t
  misc_feature (821)..(821): n is a, c, g, or t
  misc_feature (847)..(847): n is a, c, g, or t
  misc_feature (858)..(858): n is a, c, g, or t
  misc_feature (861)..(861): n is a, c, g, or t
  misc_feature (863)..(864): n is a, c, g, or t
  misc_feature (879)..(881): n is a, c, g, or t
  misc_feature (894)..(894): n is a, c, g, or t
  misc_feature (897)..(898): n is a, c, g, or t
  misc_feature (902)..(902): n is a, c, g, or t
  misc_feature (904)..(904): n is a, c, g, or t
  misc_feature (906)..(906): n is a, c, g, or t
  misc_feature (908)..(909): n is a, c, g, or t
  misc_feature (913)..(913): n is a, c, g, or t
  misc_feature (915)..(918): n is a, c, g, or t
  misc_feature (922)..(922): n is a, c, g, or t
  misc_feature (924)..(924): n is a, c, g, or t
  misc_feature (926)..(944): n is a, c, g, or t
  misc_feature (946)..(946): n is a, c, g, or t
  misc_feature (948)..(948): n is a, c, g, or t
  misc_feature (965)..(980): n is a, c, g, or t
  misc_feature (992)..(993): n is a, c, g, or t
  misc_feature (995)..(995): n is a, c, g, or t
  misc_feature (997)..(997): n is a, c, g, or t
  misc_feature (1009)..(1009): n is a, c, g, or t
  misc_feature (1018)..(1020): n is a, c, g, or t
  misc_feature (1034)..(1049): n is a, c, g, or t
  misc_feature (1053)..(1053): n is a, c, g, or t
  misc_feature (1058)..(1058): n is a, c, g, or t
  misc_feature (1068)..(1072): n is a, c, g, or t
  misc_feature (1074)..(1074): n is a, c, g, or t
  misc_feature (1076)..(1076): n is a, c, g, or t
  misc_feature (1084)..(1088): n is a, c, g, or t
  misc_feature (1113)..(1115): n is a, c, g, or t
  misc_feature (1125)..(1137): n is a, c, g, or t
  misc_feature (1140)..(1140): n is a, c, g, or t
  misc_feature (1143)..(1144): n is a, c, g, or t
  misc_feature (1146)..(1173): n is a, c, g, or t
  misc_feature (1181)..(1201): n is a, c, g, or t
  misc_feature (1203)..(1285): n is a, c, g, or t
  misc_feature (1287)..(1287): n is a, c, g, or t
  misc_feature (1291)..(1291): n is a, c, g, or t
  misc_feature (1293)..(1295): n is a, c, g, or t
  misc_feature (1297)..(1399): n is a, c, g, or t
atagagnaattactatgagaggatcgcatcaccatcaccatcacggatcctatttaggtgacactatagaatcgtcgacccacgcgtccgagtcggtccagcaacagtccacccctgttcctctcatctctcccaagcgccagattcgtagcaggttccagctgaatcttgacaagaccatagagagttgcaaagcacaattaggcataaatgaaatctcggaagatgtctatacggccgtagagcacagcgattcggaggattctgagaagtcagatagtagcgatagtgagtatatcagtgatgatgagcagaagtctaagaacgagcccgaagacccngaggacnaagaaggntgtcanatggacaaaaanccctctgctgttaaaaaaaagcccaagcntacaaacccgtnggaaanttaaagagggagctgaaaangcccctcccccnccccccggaaaaggnaaacccntgggannnttcnagggnnaaggcccccccnngaaccctggaaaagnaattttttccaaaaangggaaaaccntttcccccccccccccntaaagggnannaccntgggggggaaaaaanngnaaangggttttccccnanaggnccctttttngggncgggggcccnttnnttnnnannngggnnnttttnttttttntttttttggnaaaaaaaccttttnntggggggggggggggggncaaaaaaaaaanaaaaggnnggcccccaaaaaancctnnccccccaaaangggggngntnngnggggaaaaaccccccccccccccngggggggggggggggntnttttcccccccaaaaaaaaagggggngcccccccccnttntnnccccaaaaaaatttnnnggggggggggggnccnncacncncncnnaaanannnntttntncnnnnnnnnnnnnnnnnnnncncnccccccccccccccccnnnnnnnnnnnnnnnnaaaaaaaaaaanncncntttttttttttnaaaaaaaannncccccccccccccnnnnnnnnnnnnnnnngggnccccncccccccccnnnnnananaaaaaaannnnnccccccccccccccccccccccccnnngggggggggnnnnnnnnnnnnnccnccnncnnnnnnnnnnnnnnnnnnnnnnnnnnnntttttttnnnnnnnnnnnnnnnnnnnnncnnnnnnnnnnnnnnnnnnnnnnnnnnnnnnnnnnnnnnnnnnnnnnnnnnnnnnnnnnnnnnnnnnnnnnnnnnnnnnnnnnntntttntnnntnnnnnnnnnnnnnnnnnnnnnnnnnnnnnnnnnnnnnnnnnnnnnnnnnnnnnnnnnnnnnnnnnnnnnnnnnnnnnnnnnnnnnnnnnnnnnnnnnnnnnnn

SEQ ID NO: 362 - DNA, 1347 bp, Homo Sapiens
  misc_feature (605)..(605): n is a, c, g, or t
  misc_feature (689)..(689): n is a, c, g, or t
  misc_feature (748)..(748): n is a, c, g, or t
  misc_feature (853)..(853): n is a, c, g, or t
  misc_feature (873)..(873): n is a, c, g, or t
  misc_feature (900)..(900): n is a, c, g, or t
  misc_feature (925)..(925): n is a, c, g, or t
  misc_feature (953)..(953): n is a, c, g, or t
  misc_feature (955)..(955): n is a, c, g, or t
  misc_feature (959)..(959): n is a, c, g, or t
  misc_feature (970)..(970): n is a, c, g, or t
  misc_feature (972)..(972): n is a, c, g, or t
  misc_feature (979)..(979): n is a, c, g, or t
  misc_feature (993)..(993): n is a, c, g, or t
  misc_feature (999)..(1000): n is a, c, g, or t
  misc_feature (1009)..(1009): n is a, c, g, or t
  misc_feature (1020)..(1020): n is a, c, g, or t
  misc_feature (1022)..(1022): n is a, c, g, or t
  misc_feature (1028)..(1028): n is a, c, g, or t
  misc_feature (1032)..(1032): n is a, c, g, or t
  misc_feature (1040)..(1040): n is a, c, g, or t
  misc_feature (1042)..(1042): n is a, c, g, or t
  misc_feature (1051)..(1051): n is a, c, g, or t
  misc_feature (1060)..(1060): n is a, c, g, or t
  misc_feature (1062)..(1062): n is a, c, g, or t
  misc_feature (1065)..(1065): n is a, c, g, or t
  misc_feature (1072)..(1072): n is a, c, g, or t
  misc_feature (1076)..(1076): n is a, c, g, or t
  misc_feature (1078)..(1078): n is a, c, g, or t
  misc_feature (1081)..(1081): n is a, c, g, or t
  misc_feature (1094)..(1094): n is a, c, g, or t
  misc_feature (1106)..(1106): n is a, c, g, or t
  misc_feature (1117)..(1117): n is a, c, g, or t
  misc_feature (1131)..(1131): n is a, c, g, or t
  misc_feature (1137)..(1137): n is a, c, g, or t
  misc_feature (1143)..(1143): n is a, c, g, or t
  misc_feature (1156)..(1156): n is a, c, g, or t
  misc_feature (1158)..(1159): n is a, c, g, or t
  misc_feature (1168)..(1168): n is a, c, g, or t
  misc_feature (1185)..(1185): n is a, c, g, or t
  misc_feature (1191)..(1192): n is a, c, g, or t
  misc_feature (1197)..(1199): n is a, c, g, or t
  misc_feature (1203)..(1203): n is a, c, g, or t
  misc_feature (1208)..(1208): n is a, c, g, or t
  misc_feature (1213)..(1213): n is a, c, g, or t
  misc_feature (1216)..(1216): n is a, c, g, or t
  misc_feature (1229)..(1229): n is a, c, g, or t
  misc_feature (1232)..(1232): n is a, c, g, or t
  misc_feature (1235)..(1236): n is a, c, g, or t
  misc_feature (1240)..(1240): n is a, c, g, or t
  misc_feature (1245)..(1245): n is a, c, g, or t
  misc_feature (1254)..(1254): n is a, c, g, or t
  misc_feature (1268)..(1268): n is a, c, g, or t
  misc_feature (1273)..(1273): n is a, c, g, or t
  misc_feature (1280)..(1280): n is a, c, g, or t
  misc_feature (1284)..(1284): n is a, c, g, or t
  misc_feature (1289)..(1289): n is a, c, g, or t
  misc_feature (1299)..(1300): n is a, c, g, or t
  misc_feature (1303)..(1304): n is a, c, g, or t
  misc_feature (1316)..(1317): n is a, c, g, or t
  misc_feature (1335)..(1335): n is a, c, g, or t
  misc_feature (1340)..(1340): n is a, c, g, or t
  misc_feature (1344)..(1344): n is a, c, g, or t
  misc_feature (1347)..(1347): n is a, c, g, or t
tagagaaattactatgagaggatcgcatcaccatcaccatcacggatcctatttaggtgacactatagaatcgtcgacccacgcgtccgcccacgcgtccgctcgcctggccaccgggccacggccccacagacccagtgacaatgaggaggaggacaaggaggcggcacagctgcgggaggagcggctacggcagtacgcggagaagaaggccaagaagcctgcactggtggccaagtcctccatcctgctggatgtcaagccttgggatgatgagacggacatggctcagctggaggcctgtgtgcgctctatccagctggacgggctggtctggggggcttccaagctggtgcccgtgggctacggtatccggaagctacagattcagtgtgtggtggaggacgacaaggtggggacagacttgctggaggaggagatcaccaagtttgaggagcacgtgcagagtgtcgatatcgcagctttcaacaagatctgaagcctgagtgtgtgtacgtgcgcgcgtgcgtgaggccctgccacgattaaagactgagaccggcaaaaaaaaaaaaaaaaaaaaaaaaaaaaaaaaaaaaaaaaangggcggccgctccctatagtgagtcgtattaagcttaattagctgagcttggactcctgttgatagatccagtaatgacctcanaactccatctggatttgttcaaaacgctcggttgccgccgggcgttttttattggtganaatccaagctagcttggcgagattttcaggagctaaggaagctaaaatggaaaaaaaaaatcactggatataccaccgttgatatatcccaatggcatcgtaaanaacattttgaggcatttcantcagttgctcaatgtacctataaccanaccgttcagctggatattacggccntttttaaaaaaccgtaaaaaaaaataancncaanttttatccggncntttattnccattttttgcccncctgannaatgcctcntccggaatttncntatggnaatnaaaaaacngngaacctggngaaatgggnanaanggtttcncccntnttnaccccgttttccntgaaacaaactnaaaactttttncctccccctggaantgaaanaccccnaacaattttccgncnntttttaacnatttttttcccaaaaantggggnntgttnnngggnaaaancttgnccnattttccctaaanggnttnntttnaaaanttttttttntctcccccccccanccccnggggaantttnccccnttttttattnnaanngggcccaaaaannaaaattttttcccccccnttttnccanggn

SEQ ID NO: 363 - DNA, 1320 bp, Homo Sapiens
  misc_feature (887)..(887): n is a, c, g, or t
  misc_feature (944)..(944): n is a, c, g, or t
  misc_feature (979)..(979): n is a, c, g, or t
  misc_feature (996)..(996): n is a, c, g, or t
  misc_feature (1004)..(1004): n is a, c, g, or t
  misc_feature (1018)..(1018): n is a, c, g, or t
  misc_feature (1033)..(1033): n is a, c, g, or t
  misc_feature (1036)..(1036): n is a, c, g, or t
  misc_feature (1040)..(1040): n is a, c, g, or t
  misc_feature (1043)..(1043): n is a, c, g, or t
  misc_feature (1045)..(1045): n is a, c, g, or t
  misc_feature (1048)..(1048): n is a, c, g, or t
  misc_feature (1052)..(1052): n is a, c, g, or t
  misc_feature (1055)..(1055): n is a, c, g, or t
  misc_feature (1060)..(1060): n is a, c, g, or t
  misc_feature (1082)..(1082): n is a, c, g, or t
  misc_feature (1084)..(1084): n is a, c, g, or t
  misc_feature (1090)..(1090): n is a, c, g, or t
  misc_feature (1094)..(1094): n is a, c, g, or t
  misc_feature (1096)..(1096): n is a, c, g, or t
  misc_feature (1105)..(1105): n is a, c, g, or t
  misc_feature (1133)..(1133): n is a, c, g, or t
  misc_feature (1143)..(1143): n is a, c, g, or t
  misc_feature (1150)..(1150): n is a, c, g, or t
  misc_feature (1160)..(1161): n is a, c, g, or t
  misc_feature (1179)..(1179): n is a, c, g, or t
  misc_feature (1181)..(1181): n is a, c, g, or t
  misc_feature (1184)..(1184): n is a, c, g, or t
  misc_feature (1198)..(1198): n is a, c, g, or t
  misc_feature (1207)..(1207): n is a, c, g, or t
  misc_feature (1210)..(1211): n is a, c, g, or t
  misc_feature (1219)..(1219): n is a, c, g, or t
  misc_feature (1225)..(1225): n is a, c, g, or t
  misc_feature (1230)..(1231): n is a, c, g, or t
  misc_feature (1237)..(1237): n is a, c, g, or t
  misc_feature (1242)..(1242): n is a, c, g, or t
  misc_feature (1261)..(1261): n is a, c, g, or t
  misc_feature (1273)..(1273): n is a, c, g, or t
  misc_feature (1278)..(1278): n is a, c, g, or t
  misc_feature (1282)..(1282): n is a, c, g, or t
  misc_feature (1303)..(1304): n is a, c, g, or t
  misc_feature (1306)..(1306): n is a, c, g, or t
  misc_feature (1308)..(1309): n is a, c, g, or t
  misc_feature (1317)..(1317): n is a, c, g, or t
tagagaaattactatgagaggatcgcatcaccatcaccatcacggatcctatttaggtgacactatagaatcgtcgacccacgcgtccgcccacgcgtccgcgctgacgggcacgctgactggaggctggcggacaggcgacagcgacctgcggcaggaccagaggagcgagagcagcaagaaccacacccagcagcaatgtcagcggaagtggaaacctcagagggggtagacgagtcagaaaaaaagaactctggggccctagaaaaggagaaccaaatgagaatggctgacctctcggagctcctgaaggaagggaccaaggaagcacacgaccgggcagaaaacacccagtttgtcaaggacttcttgaaaggcaacattaagaaggagctgtttaagctggccaccacggcactttacttcacatactcagccctcgaggaggaaatggagcgcaacaaggaccatccagcctttgcccctttgtacttccccatggagctgcaccggaaggaggcgctgaccaaggacatggagtatttctttggtgaaaactgggaggagcaggtgcagtgccccaaggctgcccagaagtacgtggagcggatccactacatagggcagaacgagccggagctactggtggcccatgcatacacccgctacatgggggatctctcggggggccaggtgctgaagaaggtggcccagcgagcactgaaactccccagcacaggggaagggacccagttctacctgtttgagaatgtggacaatgcccagcagttcaagcagctctaccgggccaggatgaacgccctggacctgaacatgaagaccaaagagaggatcgtggaggaggccaacaaggcttttgagtatancatgcagatattcaatgaactggaccaggccggctccacactggccaaaaagacctnggaggatgggttccctgtacacgatgggaaagganacatgcgtaaatgcccntttctacnctgctgaacaaaanaaaggtgccctgganggnacanctntnccnttcnaanagctntggcttgtgctgaagaaacccnancctccnattncntcctggccnctggggtggccctaactgctggactctnggcctggtantactggnaacccccttnntgcccaccggtaccctcntnccnaatgaaccttggcntaccctttnccnnccctgaanaaatanccccnngggganttttnaaaagggggggttttaaanggcccctaaaanccaantttnaaaaaaaaaaaagggggcccnncntnntggatttntta

SEQ ID NO: 364 - DNA, 1208 bp, Homo Sapiens
  misc_feature (19)..(19): n is a, c, g, or t
  misc_feature (52)..(52): n is a, c, g, or t
  misc_feature (796)..(796): n is a, c, g, or t
  misc_feature (824)..(835): n is a, c, g, or t
  misc_feature (837)..(837): n is a, c, g, or t
  misc_feature (839)..(843): n is a, c, g, or t
  misc_feature (885)..(885): n is a, c, g, or t
  misc_feature (890)..(890): n is a, c, g, or t
  misc_feature (910)..(910): n is a, c, g, or t
  misc_feature (940)..(940): n is a, c, g, or t
  misc_feature (987)..(987): n is a, c, g, or t
  misc_feature (993)..(993): n is a, c, g, or t
  misc_feature (1007)..(1007): n is a, c, g, or t
  misc_feature (1021)..(1021): n is a, c, g, or t
  misc_feature (1026)..(1026): n is a, c, g, or t
  misc_feature (1028)..(1028): n is a, c, g, or t
  misc_feature (1030)..(1030): n is a, c, g, or t
  misc_feature (1032)..(1032): n is a, c, g, or t
  misc_feature (1064)..(1064): n is a, c, g, or t
  misc_feature (1070)..(1070): n is a, c, g, or t
  misc_feature (1074)..(1074): n is a, c, g, or t
  misc_feature (1076)..(1076): n is a, c, g, or t
  misc_feature (1081)..(1082): n is a, c, g, or t
  misc_feature (1107)..(1107): n is a, c, g, or t
  misc_feature (1114)..(1114): n is a, c, g, or t
  misc_feature (1117)..(1117): n is a, c, g, or t
  misc_feature (1122)..(1122): n is a, c, g, or t
  misc_feature (1130)..(1130): n is a, c, g, or t
  misc_feature (1139)..(1139): n is a, c, g, or t
  misc_feature (1141)..(1141): n is a, c, g, or t
  misc_feature (1150)..(1150): n is a, c, g, or t
  misc_feature (1152)..(1152): n is a, c, g, or t
  misc_feature (1157)..(1157): n is a, c, g, or t
  misc_feature (1167)..(1167): n is a, c, g, or t
  misc_feature (1176)..(1176): n is a, c, g, or t
  misc_feature (1183)..(1184): n is a, c, g, or t
  misc_feature (1194)..(1194): n is a, c, g, or t
  misc_feature (1208)..(1208): n is a, c, g, or t
attagaggaaaattactangagaggatcgcatcaccattcaccattcacggnatcctatttaggtgacactatagaatcgtcgacccacgcgtccggccgaagccgcacctcccgcatggcccctccggccagccgggcccctcagatgagagctgcacccaggccagcaccagtcgctcagccaccagcagcggcacccccatctgcagttggctcttctgctgctgcgccccggcagccaggtctgatggcccagatggcaaccactgcagctggcgtggctgtgggctctgctgtggggcacacattgggtcacgccattactgggggcttcagtggaggaagtaatgctgagcctgcgaggcctgacatcacttaccaggagcctcagggaacccagccagcacagcagcagcagccttgcctctatgagatcaaacagtttctggagtgtgcccagaaccagggtgacatcaagctctgtgagggtttcaatgaggtgctgaaacagtgccgacttgcaaacggattggcctaatgaagaagttcaacctggagagatggaaaatcagctctcataactaagttaatttagtataaaaatagaattgatagtgagggtataaagtgtaaccatcagttaaacctctcctgtcattcctagcttccttgcttcagaattgaaatggaagtgggggtgtccctactctgtagaatctgggactgggcaaatgtttgtgtggcctccttaaactagctgttatgttatgattttattctttgtgagttaattanaataaagtcattttcttccaaggaaaannnnnnnnnnnnanannnnngggcggccgctccctatagtgagtcgtattaagcttaattanctgancttggactcctggttgatanatccagtaatgacctcaaaactccatctgnatttgttcaaaacgctcggttgccgccgggcgttttttattggtganaatccnaagctagcttggcnaaaattttcagganctaangnancntaaaatggaaaaaaaaatccctggatataccnccgttnaaantncccannggcatcgtaaaaaaaattttgaggnatttcantcnatttncttcatgnacctaaaancnaaaccgttnanctggnaattaaaggnccttttttnaaaaacnntaaaaaaaanaaacccaatttttn

SEQ ID NO: 365 - DNA, 1348 bp, Homo Sapiens
  misc_feature (1)..(1): n is a, c, g, or t
  misc_feature (5)..(13): n is a, c, g, or t
  misc_feature (633)..(633): n is a, c, g, or t
  misc_feature (822)..(822): n is a, c, g, or t
  misc_feature (832)..(832): n is a, c, g, or t
  misc_feature (850)..(850): n is a, c, g, or t
  misc_feature (856)..(856): n is a, c, g, or t
  misc_feature (888)..(888): n is a, c, g, or t
  misc_feature (898)..(899): n is a, c, g, or t
  misc_feature (921)..(921): n is a, c, g, or t
  misc_feature (947)..(947): n is a, c, g, or t
  misc_feature (950)..(950): n is a, c, g, or t
  misc_feature (985)..(985): n is a, c, g, or t
  misc_feature (989)..(989): n is a, c, g, or t
  misc_feature (991)..(991): n is a, c, g, or t
  misc_feature (996)..(996): n is a, c, g, or t
  misc_feature (999)..(999): n is a, c, g, or t
  misc_feature (1009)..(1009): n is a, c, g, or t
  misc_feature (1019)..(1019): n is a, c, g, or t
  misc_feature (1023)..(1023): n is a, c, g, or t
  misc_feature (1026)..(1026): n is a, c, g, or t
  misc_feature (1038)..(1038): n is a, c, g, or t
  misc_feature (1057)..(1057): n is a, c, g, or t
  misc_feature (1080)..(1080): n is a, c, g, or t
  misc_feature (1082)..(1082): n is a, c, g, or t
  misc_feature (1092)..(1094): n is a, c, g, or t
  misc_feature (1105)..(1107): n is a, c, g, or t
  misc_feature (1116)..(1116): n is a, c, g, or t
  misc_feature (1118)..(1119): n is a, c, g, or t
  misc_feature (1131)..(1132): n is a, c, g, or t
  misc_feature (1139)..(1139): n is a, c, g, or t
  misc_feature (1143)..(1143): n is a, c, g, or t
  misc_feature (1145)..(1145): n is a, c, g, or t
  misc_feature (1147)..(1147): n is a, c, g, or t
  misc_feature (1151)..(1152): n is a, c, g, or t
  misc_feature (1155)..(1155): n is a, c, g, or t
  misc_feature (1160)..(1161): n is a, c, g, or t
  misc_feature (1163)..(1163): n is a, c, g, or t
  misc_feature (1175)..(1175): n is a, c, g, or t
  misc_feature (1177)..(1177): n is a, c, g, or t
  misc_feature (1181)..(1181): n is a, c, g, or t
  misc_feature (1198)..(1198): n is a, c, g, or t
  misc_feature (1208)..(1209): n is a, c, g, or t
  misc_feature (1211)..(1212): n is a, c, g, or t
  misc_feature (1222)..(1222): n is a, c, g, or t
  misc_feature (1224)..(1224): n is a, c, g, or t
  misc_feature (1227)..(1227): n is a, c, g, or t
  misc_feature (1236)..(1236): n is a, c, g, or t
  misc_feature (1245)..(1245): n is a, c, g, or t
  misc_feature (1251)..(1251): n is a, c, g, or t
  misc_feature (1253)..(1253): n is a, c, g, or t
  misc_feature (1256)..(1256): n is a, c, g, or t
  misc_feature (1258)..(1261): n is a, c, g, or t
  misc_feature (1264)..(1264): n is a, c, g, or t
  misc_feature (1266)..(1266): n is a, c, g, or t
  misc_feature (1269)..(1269): n is a, c, g, or t
  misc_feature (1280)..(1280): n is a, c, g, or t
  misc_feature (1282)..(1282): n is a, c, g, or t
  misc_feature (1285)..(1285): n is a, c, g, or t
  misc_feature (1287)..(1289): n is a, c, g, or t
  misc_feature (1299)..(1299): n is a, c, g, or t
  misc_feature (1301)..(1301): n is a, c, g, or t
  misc_feature (1321)..(1322): n is a, c, g, or t
  misc_feature (1325)..(1325): n is a, c, g, or t
  misc_feature (1332)..(1332): n is a, c, g, or t
  misc_feature (1334)..(1335): n is a, c, g, or t
  misc_feature (1342)..(1343): n is a, c, g, or t
ntttnnnnnnnnnattagagaaattactatgagaggatcgcatcaccatcaccatcacgggatcctatttaggtgacactatagaatcgtcgacccacgcgtccgggatgttccgcgccttcggccaccacgccgtgtcactgcttgatggcggcctccgccactggctgcgccagaacctcccgctcagctccggcaagagccaacctgctcccgccgagttccgcgctcagctcgaccccgccttcatcaagacctacgaggacatcaaggagaacctggaatcccggcgcttccaggtggtggactcccgagccactggcaggttccgcggcaccgagcccgagccccgagacggcattgaacctggccacatcccaggtaccgtgaacatccccttcacagacttcctgagccaggaggggctggagaagagccctgaggagatccgccatctgttccaggagaagaaagtggacctgtctaagccactggtggccacgtgtggctctggcgtcacagcctgccacgtggcactaggggcctacctctgcggcaagccagacgtgcccatctacgatggctcctgggtggagtggtacatgcgcgcccggcccgaggatgtcatctcanagggccgggggaagacccactgaagctgggcaggacacaggcgagctcaggtgatgccggccaccagcaatgcctggcctggtagctccgcttctgctttcaccaagagagtgtttcttcactcaactcaggtggcatttggggtgacatctcaaaggccaggaattccgttgacttgttggctgccantaggggcggnaggaaaggcggaggcganccctgnaggaaggaggccacaactccgagctgcccacntggtgctganntggggccccgcctcctttctgnttttattttttgaggaaaataaaaanaanccaagtgcttaaaaaaaaaaaaaaaaagggccggnccgntncctanaantgagtcgaantaaacttaanttanctnaattttggaacncctgttgaaaaatcccagnaaatgaacctcaaaaattccatncnggattttttnnnaaacacccggnnngcccccagngnnttttttattggnnaaaaaanaaantnanttgnnaanttttnngnactaaaggaaantnaaanggaaaaaaaaccctggnaaaaaccccnntnnaaaatccaangnttntaaaaaaanttttaaggntttttntncantnnnncangnaancataaacaaancnttncnnngaaaaaacgncnttttaaaaccaaaaaaaaanncanttttttngnnctttttnnttttt

SEQ ID NO: 366 - DNA, 1404 bp, Homo Sapiens
  misc_feature (8)..(8): n is a, c, g, or t
  misc_feature (860)..(860): n is a, c, g, or t
  misc_feature (868)..(868): n is a, c, g, or t
  misc_feature (881)..(881): n is a, c, g, or t
  misc_feature (931)..(931): n is a, c, g, or t
  misc_feature (963)..(963): n is a, c, g, or t
  misc_feature (992)..(992): n is a, c, g, or t
  misc_feature (1012)..(1013): n is a, c, g, or t
  misc_feature (1023)..(1024): n is a, c, g, or t
  misc_feature (1032)..(1032): n is a, c, g, or t
  misc_feature (1037)..(1037): n is a, c, g, or t
  misc_feature (1039)..(1039): n is a, c, g, or t
  misc_feature (1057)..(1057): n is a, c, g, or t
  misc_feature (1062)..(1062): n is a, c, g, or t
  misc_feature (1064)..(1065): n is a, c, g, or t
  misc_feature (1075)..(1075): n is a, c, g, or t
  misc_feature (1096)..(1096): n is a, c, g, or t
  misc_feature (1102)..(1103): n is a, c, g, or t
  misc_feature (1105)..(1106): n is a, c, g, or t
  misc_feature (1111)..(1111): n is a, c, g, or t
  misc_feature (1113)..(1113): n is a, c, g, or t
  misc_feature (1115)..(1116): n is a, c, g, or t
  misc_feature (1118)..(1118): n is a, c, g, or t
  misc_feature (1120)..(1122): n is a, c, g, or t
  misc_feature (1124)..(1128): n is a, c, g, or t
  misc_feature (1136)..(1137): n is a, c, g, or t
  misc_feature (1145)..(1145): n is a, c, g, or t
  misc_feature (1151)..(1151): n is a, c, g, or t
  misc_feature (1165)..(1165): n is a, c, g, or t
  misc_feature (1179)..(1180): n is a, c, g, or t
  misc_feature (1189)..(1189): n is a, c, g, or t
  misc_feature (1192)..(1194): n is a, c, g, or t
  misc_feature (1196)..(1196): n is a, c, g, or t
  misc_feature (1206)..(1206): n is a, c, g, or t
  misc_feature (1208)..(1208): n is a, c, g, or t
  misc_feature (1226)..(1226): n is a, c, g, or t
  misc_feature (1229)..(1229): n is a, c, g, or t
  misc_feature (1237)..(1237): n is a, c, g, or t
  misc_feature (1240)..(1240): n is a, c, g, or t
  misc_feature (1245)..(1246): n is a, c, g, or t
  misc_feature (1254)..(1254): n is a, c, g, or t
  misc_feature (1259)..(1259): n is a, c, g, or t
  misc_feature (1262)..(1263): n is a, c, g, or t
  misc_feature (1279)..(1279): n is a, c, g, or t
  misc_feature (1282)..(1282): n is a, c, g, or t
  misc_feature (1291)..(1291): n is a, c, g, or t
  misc_feature (1293)..(1293): n is a, c, g, or t
  misc_feature (1303)..(1303): n is a, c, g, or t
  misc_feature (1318)..(1318): n is a, c, g, or t
  misc_feature (1331)..(1331): n is a, c, g, or t
  misc_feature (1333)..(1333): n is a, c, g, or t
  misc_feature (1338)..(1338): n is a, c, g, or t
  misc_feature (1358)..(1358): n is a, c, g, or t
  misc_feature (1371)..(1371): n is a, c, g, or t
  misc_feature (1379)..(1380): n is a, c, g, or t
  misc_feature (1390)..(1390): n is a, c, g, or t
  misc_feature (1392)..(1392): n is a, c, g, or t
  misc_feature (1395)..(1395): n is a, c, g, or t
  misc_feature (1399)..(1399): n is a, c, g, or t
  misc_feature (1401)..(1401): n is a, c, g, or t
aatagagnaattactatgagaggatcgcatcaccatcaccatcacggatcctatttaggtgacactatagaatcgtcgacccacgcgtccgcattcgcggctgctcaagatgaaccgactcttcgggaaagcgaaacccaaggctccgccgcccagcctgactgactgcattggcacggtggacagtagagcagaatccattgacaagaagatttctcgattggatgctgagctagtgaagtataaggatcagatcaagaagatgagagagggtcctgcaaagaatatggtcaagcagaaagccttgcgagttttaaagcaaaagaggatgtatgagcagcagcgggacaatcttgcccaacagtcattcaacatggaacaagccaattataccatccagtctttgaaggacaccaagaccacggttgatgctatgaaactgggagtaaaggaaatgaagaaggcatacaagcaagtgaagatcgaccagattgaggatttacaagaccagctagaggatatgatggaagatgcaaatgaaatccaagaagcactgagtcgcagttatggcaccccagaactggatgaagatgatttagaagcagagttggatgcactaggtgatgagcttctggctgatgaagacagttcttatttggatgaggcagcatctgcacctgcaattccagaaggtgttcccactgatacaaaaaacaaggatggagttctggtggatgaatttggattgccacagatccctgcttcatagatttgcatcattcaagcatatcttgtaaaacaaacacatattatgggactaggaaatatttatcttttccaaatttgccataacagatttnaggtttcntttcctttctttngaaggaaagttttaattacattgctccttttattttttcccatttaaganactccattgccttgggaaaatgcttttcttcntactaaaattttgattcccttttttttcnttatgaaaaacccaacctcnnttttaaaagnntttttaanctcgnangacttgttttcccttccnttaanannattttgaaanaaaaacttaaggaaatggaancctttnncnnaaaananannanannnannnnnggggccgnncccccccnttaagnggggccctattaanccttatttacctgnncttgggccnccnnntnaaaaaacccntnatgcccccccaacctccnctntggatttnttncaaanncccccttnccccnggnntttttttttggaaaanccnacctccttngncaaattttcngggctcaggaacctnaagggaaaaaaancncgggnatcccccctttaatatcccngggccccaaaaanattttagnnttttcccggncncanatcncnaac

SEQ ID NO: 367 - DNA, 1467 bp, Homo Sapiens
  misc_feature (6)..(6): n is a, c, g, or t
  misc_feature (185)..(185): n is a, c, g, or t
  misc_feature (194)..(194): n is a, c, g, or t
  misc_feature (207)..(207): n is a, c, g, or t
  misc_feature (220)..(220): n is a, c, g, or t
  misc_feature (232)..(232): n is a, c, g, or t
  misc_feature (234)..(234): n is a, c, g, or t
  misc_feature (237)..(237): n is a, c, g, or t
  misc_feature (241)..(241): n is a, c, g, or t
  misc_feature (244)..(245): n is a, c, g, or t
  misc_feature (253)..(253): n is a, c, g, or t
  misc_feature (257)..(257): n is a, c, g, or t
  misc_feature (262)..(262): n is a, c, g, or t
  misc_feature (269)..(269): n is a, c, g, or t
  misc_feature (276)..(276): n is a, c, g, or t
  misc_feature (288)..(288): n is a, c, g, or t
  misc_feature (292)..(292): n is a, c, g, or t
  misc_feature (295)..(295): n is a, c, g, or t
  misc_feature (299)..(299): n is a, c, g, or t
  misc_feature (305)..(305): n is a, c, g, or t
  misc_feature (307)..(307): n is a, c, g, or t
  misc_feature (309)..(311): n is a, c, g, or t
  misc_feature (314)..(314): n is a, c, g, or t
  misc_feature (316)..(317): n is a, c, g, or t
  misc_feature (323)..(323): n is a, c, g, or t
  misc_feature (328)..(328): n is a, c, g, or t
  misc_feature (334)..(334): n is a, c, g, or t
  misc_feature (337)..(337): n is a, c, g, or t
  misc_feature (342)..(342): n is a, c, g, or t
  misc_feature (344)..(344): n is a, c, g, or t
  misc_feature (348)..(348): n is a, c, g, or t
  misc_feature (350)..(351): n is a, c, g, or t
  misc_feature (354)..(357): n is a, c, g, or t
  misc_feature (364)..(365): n is a, c, g, or t
  misc_feature (369)..(369): n is a, c, g, or t
  misc_feature (373)..(373): n is a, c, g, or t
  misc_feature (375)..(376): n is a, c, g, or t
  misc_feature (379)..(379): n is a, c, g, or t
  misc_feature (381)..(381): n is a, c, g, or t
  misc_feature (389)..(390): n is a, c, g, or t
  misc_feature (399)..(399): n is a, c, g, or t
  misc_feature (401)..(403): n is a, c, g, or t
  misc_feature (405)..(405): n is a, c, g, or t
  misc_feature (408)..(408): n is a, c, g, or t
  misc_feature (410)..(410): n is a, c, g, or t
  misc_feature (415)..(415): n is a, c, g, or t
  misc_feature (419)..(419): n is a, c, g, or t
  misc_feature (421)..(422): n is a, c, g, or t
  misc_feature (441)..(442): n is a, c, g, or t
  misc_feature (446)..(446): n is a, c, g, or t
  misc_feature (454)..(456): n is a, c, g, or t
  misc_feature (467)..(467): n is a, c, g, or t
  misc_feature (469)..(469): n is a, c, g, or t
  misc_feature (472)..(473): n is a, c, g, or t
  misc_feature (475)..(475): n is a, c, g, or t
  misc_feature (478)..(478): n is a, c, g, or t
  misc_feature (484)..(484): n is a, c, g, or t
  misc_feature (491)..(493): n is a, c, g, or t
  misc_feature (495)..(495): n is a, c, g, or t
  misc_feature (499)..(499): n is a, c, g, or t
  misc_feature (503)..(503): n is a, c, g, or t
  misc_feature (508)..(508): n is a, c, g, or t
  misc_feature (513)..(514): n is a, c, g, or t
  misc_feature (519)..(519): n is a, c, g, or t
  misc_feature (522)..(523): n is a, c, g, or t
  misc_feature (526)..(526): n is a, c, g, or t
  misc_feature (528)..(528): n is a, c, g, or t
  misc_feature (538)..(538): n is a, c, g, or t
  misc_feature (547)..(548): n is a, c, g, or t
  misc_feature (550)..(550): n is a, c, g, or t
  misc_feature (552)..(554): n is a, c, g, or t
  misc_feature (559)..(561): n is a, c, g, or t
  misc_feature (565)..(566): n is a, c, g, or t
  misc_feature (570)..(570): n is a, c, g, or t
  misc_feature (575)..(575): n is a, c, g, or t
  misc_feature (577)..(577): n is a, c, g, or t
  misc_feature (581)..(583): n is a, c, g, or t
  misc_feature (585)..(587): n is a, c, g, or t
  misc_feature (591)..(591): n is a, c, g, or t
  misc_feature (594)..(595): n is a, c, g, or t
  misc_feature (600)..(601): n is a, c, g, or t
  misc_feature (608)..(608): n is a, c, g, or t
  misc_feature (619)..(619): n is a, c, g, or t
  misc_feature (621)..(621): n is a, c, g, or t
  misc_feature (626)..(626): n is a, c, g, or t
  misc_feature (628)..(628): n is a, c, g, or t
  misc_feature (630)..(631): n is a, c, g, or t
  misc_feature (635)..(635): n is a, c, g, or t
  misc_feature (638)..(639): n is a, c, g, or t
  misc_feature (641)..(641): n is a, c, g, or t
  misc_feature (643)..(643): n is a, c, g, or t
  misc_feature (652)..(652): n is a, c, g, or t
  misc_feature (655)..(655): n is a, c, g, or t
  misc_feature (661)..(661): n is a, c, g, or t
  misc_feature (672)..(672): n is a, c, g, or t
  misc_feature (678)..(678): n is a, c, g, or t
  misc_feature (681)..(681): n is a, c, g, or t
  misc_feature (683)..(683): n is a, c, g, or t
  misc_feature (686)..(686): n is a, c, g, or t
  misc_feature (688)..(688): n is a, c, g, or t
  misc_feature (701)..(701): n is a, c, g, or t
  misc_feature (704)..(704): n is a, c, g, or t
  misc_feature (707)..(707): n is a, c, g, or t
  misc_feature (711)..(712): n is a, c, g, or t
  misc_feature (719)..(720): n is a, c, g, or t
  misc_feature (724)..(725): n is a, c, g, or t
  misc_feature (734)..(734): n is a, c, g, or t
  misc_feature (738)..(738): n is a, c, g, or t
  misc_feature (743)..(744): n is a, c, g, or t
  misc_feature (749)..(749): n is a, c, g, or t
  misc_feature (752)..(752): n is a, c, g, or t
  misc_feature (757)..(757): n is a, c, g, or t
  misc_feature (759)..(759): n is a, c, g, or t
  misc_feature (768)..(768): n is a, c, g, or t
  misc_feature (770)..(771): n is a, c, g, or t
  misc_feature (773)..(774): n is a, c, g, or t
  misc_feature (776)..(776): n is a, c, g, or t
  misc_feature (779)..(780): n is a, c, g, or t
  misc_feature (783)..(784): n is a, c, g, or t
  misc_feature (787)..(787): n is a, c, g, or t
  misc_feature (789)..(789): n is a, c, g, or t
  misc_feature (794)..(794): n is a, c, g, or t
  misc_feature (797)..(797): n is a, c, g, or t
  misc_feature (803)..(803): n is a, c, g, or t
  misc_feature (806)..(808): n is a, c, g, or t
  misc_feature (811)..(811): n is a, c, g, or t
  misc_feature (813)..(813): n is a, c, g, or t
  misc_feature (816)..(816): n is a, c, g, or t
  misc_feature (818)..(820): n is a, c, g, or t
  misc_feature (822)..(823): n is a, c, g, or t
  misc_feature (825)..(826): n is a, c, g, or t
  misc_feature (829)..(829): n is a, c, g, or t
  misc_feature (843)..(843): n is a, c, g, or t
  misc_feature (850)..(852): n is a, c, g, or t
  misc_feature (857)..(857): n is a, c, g, or t
  misc_feature (864)..(865): n is a, c, g, or t
  misc_feature (867)..(867): n is a, c, g, or t
  misc_feature (872)..(872): n is a, c, g, or t
  misc_feature (874)..(874): n is a, c, g, or t
  misc_feature (877)..(877): n is a, c, g, or t
  misc_feature (880)..(880): n is a, c, g, or t
  misc_feature (882)..(882): n is a, c, g, or t
  misc_feature (885)..(885): n is a, c, g, or t
  misc_feature (888)..(889): n is a, c, g, or t
  misc_feature (891)..(891): n is a, c, g, or t
  misc_feature (896)..(896): n is a, c, g, or t
  misc_feature (899)..(899): n is a, c, g, or t
  misc_feature (902)..(902): n is a, c, g, or t
  misc_feature (907)..(907): n is a, c, g, or t
  misc_feature (912)..(912): n is a, c, g, or t
  misc_feature (915)..(916): n is a, c, g, or t
  misc_feature (918)..(918): n is a, c, g, or t
  misc_feature (920)..(920): n is a, c, g, or t
  misc_feature (925)..(925): n is a, c, g, or t
  misc_feature (927)..(927): n is a, c, g, or t
  misc_feature (935)..(937): n is a, c, g, or t
  misc_feature (942)..(943): n is a, c, g, or t
  misc_feature (951)..(951): n is a, c, g, or t
  misc_feature (953)..(953): n is a, c, g, or t
  misc_feature (960)..(960): n is a, c, g, or t
  misc_feature (962)..(962): n is a, c, g, or t
  misc_feature (967)..(968): n is a, c, g, or t
  misc_feature (970)..(971): n is a, c, g, or t
  misc_feature (977)..(977): n is a, c, g, or t
  misc_feature (979)..(979): n is a, c, g, or t
  misc_feature (989)..(989): n is a, c, g, or t
  misc_feature (996)..(996): n is a, c, g, or t
  misc_feature (1002)..(1002): n is a, c, g, or t
  misc_feature (1009)..(1015): n is a, c, g, or t
  misc_feature (1019)..(1019): n is a, c, g, or t
  misc_feature (1022)..(1022): n is a, c, g, or t
  misc_feature (1024)..(1025): n is a, c, g, or t
  misc_feature (1027)..(1028): n is a, c, g, or t
  misc_feature (1030)..(1030): n is a, c, g, or t
  misc_feature (1032)..(1032): n is a, c, g, or t
  misc_feature (1037)..(1037): n is a, c, g, or t
  misc_feature (1039)..(1039): n is a, c, g, or t
  misc_feature (1043)..(1043): n is a, c, g, or t
  misc_feature (1045)..(1045): n is a, c, g, or t
  misc_feature (1048)..(1048): n is a, c, g, or t
  misc_feature (1053)..(1056): n is a, c, g, or t
  misc_feature (1060)..(1060): n is a, c, g, or t
  misc_feature (1063)..(1064): n is a, c, g, or t
  misc_feature (1069)..(1069): n is a, c, g, or t
  misc_feature (1071)..(1071): n is a, c, g, or t
  misc_feature (1073)..(1073): n is a, c, g, or t
  misc_feature (1075)..(1075): n is a, c, g, or t
  misc_feature (1077)..(1077): n is a, c, g, or t
  misc_feature (1083)..(1083): n is a, c, g, or t
  misc_feature (1088)..(1088): n is a, c, g, or t
  misc_feature (1091)..(1091): n is a, c, g, or t
  misc_feature (1094)..(1094): n is a, c, g, or t
  misc_feature (1097)..(1097): n is a, c, g, or t
  misc_feature (1101)..(1101): n is a, c, g, or t
  misc_feature (1110)..(1110): n is a, c, g, or t
  misc_feature (1119)..(1120): n is a, c, g, or t
  misc_feature (1129)..(1130): n is a, c, g, or t
  misc_feature (1132)..(1133): n is a, c, g, or t
  misc_feature (1150)..(1150): n is a, c, g, or t
  misc_feature (1154)..(1154): n is a, c, g, or t
  misc_feature (1156)..(1157): n is a, c, g, or t
  misc_feature (1159)..(1159): n is a, c, g, or t
  misc_feature (1161)..(1161): n is a, c, g, or t
  misc_feature (1163)..(1163): n is a, c, g, or t
  misc_feature (1166)..(1168): n is a, c, g, or t
  misc_feature (1171)..(1171): n is a, c, g, or t
  misc_feature (1173)..(1175): n is a, c, g, or t
  misc_feature (1180)..(1181): n is a, c, g, or t
  misc_feature (1183)..(1183): n is a, c, g, or t
  misc_feature (1185)..(1185): n is a, c, g, or t
  misc_feature (1187)..(1187): n is a, c, g, or t
  misc_feature (1191)..(1192): n is a, c, g, or t
  misc_feature (1202)..(1202): n is a, c, g, or t
  misc_feature (1207)..(1207): n is a, c, g, or t
  misc_feature (1210)..(1210): n is a, c, g, or t
  misc_feature (1213)..(1214): n is a, c, g, or t
  misc_feature (1220)..(1220): n is a, c, g, or t
  misc_feature (1228)..(1228): n is a, c, g, or t
  misc_feature (1235)..(1235): n is a, c, g, or t
  misc_feature (1239)..(1239): n is a, c, g, or t
  misc_feature (1242)..(1242): n is a, c, g, or t
  misc_feature (1244)..(1244): n is a, c, g, or t
  misc_feature (1249)..(1251): n is a, c, g, or t
  misc_feature (1255)..(1255): n is a, c, g, or t
  misc_feature (1257)..(1258): n is a, c, g, or t
  misc_feature (1261)..(1263): n is a, c, g, or t
  misc_feature (1265)..(1267): n is a, c, g, or t
  misc_feature (1272)..(1275): n is a, c, g, or t
  misc_feature (1280)..(1280): n is a, c, g, or t
  misc_feature (1284)..(1284): n is a, c, g, or t
  misc_feature (1288)..(1288): n is a, c, g, or t
  misc_feature (1297)..(1297): n is a, c, g, or t
  misc_feature (1301)..(1301): n is a, c, g, or t
  misc_feature (1304)..(1304): n is a, c, g, or t
  misc_feature (1306)..(1306): n is a, c, g, or t
  misc_feature (1308)..(1308): n is a, c, g, or t
  misc_feature (1313)..(1313): n is a, c, g, or t
  misc_feature (1316)..(1316): n is a, c, g, or t
  misc_feature (1319)..(1319): n is a, c, g, or t
  misc_feature (1323)..(1324): n is a, c, g, or t
  misc_feature (1328)..(1330): n is a, c, g, or t
  misc_feature (1333)..(1333): n is a, c, g, or t
  misc_feature (1339)..(1339): n is a, c, g, or t
  misc_feature (1345)..(1345): n is a, c, g, or t
  misc_feature (1348)..(1349): n is a, c, g, or t
  misc_feature (1351)..(1351): n is a, c, g, or t
  misc_feature (1355)..(1355): n is a, c, g, or t
  misc_feature (1359)..(1359): n is a, c, g, or t
  misc_feature (1370)..(1372): n is a, c, g, or t
  misc_feature (1381)..(1381): n is a, c, g, or t
  misc_feature (1385)..(1385): n is a, c, g, or t
  misc_feature (1387)..(1387): n is a, c, g, or t
  misc_feature (1390)..(1390): n is a, c, g, or t
  misc_feature (1395)..(1395): n is a, c, g, or t
  misc_feature (1402)..(1402): n is a, c, g, or t
  misc_feature (1406)..(1407): n is a, c, g, or t
  misc_feature (1409)..(1409): n is a, c, g, or t
  misc_feature (1412)..(1413): n is a, c, g, or t
  misc_feature (1415)..(1416): n is a, c, g, or t
  misc_feature (1420)..(1423): n is a, c, g, or t
  misc_feature (1425)..(1425): n is a, c, g, or t
  misc_feature (1427)..(1428): n is a, c, g, or t
  misc_feature (1431)..(1431): n is a, c, g, or t
  misc_feature (1434)..(1437): n is a, c, g, or t
  misc_feature (1440)..(1440): n is a, c, g, or t
  misc_feature (1447)..(1447): n is a, c, g, or t
  misc_feature (1449)..(1452): n is a, c, g, or t
  misc_feature (1454)..(1454): n is a, c, g, or t
  misc_feature (1456)..(1456): n is a, c, g, or t
  misc_feature (1458)..(1458): n is a, c, g, or t
  misc_feature (1463)..(1463): n is a, c, g, or t
  misc_feature (1465)..(1465): n is a, c, g, or t
  misc_feature (1467)..(1467): n is a, c, g, or t
agagantaactatgagaggatcgcatcaccatcaccatcacggatcctatttaggtgacactatagaatcgtcgacccacgcgtccgggcttggcggttggagcggctgtcgccatgttgtcggtagcagcccgctcgggcccgttcgcgcccgtcctgtcggccacgtcccgcggggtggcggncgcgctgcngcccttggtgcangccacggtgcccncaacccgggagnangangttntgnnaatgaatnggcncgtcngcaagcngaaatanctaaacaactangagnaanccgnaacttngnannnccngnnaaactnaatanccctgnatnaaaangntatncnnatnnnnacataanngtgnaaanannacncnaaaaaaanncctactatnannntnaanantaaanaaancnnttaataaaaaaaaaaatannaatnttaaatcnnncactaatttananaanncntcnataatnaaaatcnnnanaaantaanaaaanaaaanntatantannaantntaatatcatnaaaattaannanannnaaaannnccannaaantatanancaannntnnnaatnttnncaatnnaataaantataatcaaantntaaantnannatantannananattcatatntanatgaanctaaaaaaacntaaaanaananttncntaaaaaaaaaaanatnaanaatnnaaattanncttnnaaacctaanaatntaatnnaatanaanaaatntnaaaaaaatnannanntnctnnaannatncnaaatntantaatantannnaananaantnnntnnanntanaaataataaatttnatttttnnnataanaatttannantaaantnaancananccnatnnanaaatnttnatncaaantctanttnntntnaaatnanactaaaannnaatanntaaaaaanantattaananataannannatcatntntaatttatanttaaacnaaaaanaaaaccnnnnnnnaaancanannanntnanttatntntctntntanaaaannnnattnacnntaaantnantnanaatttntttanaantcnaanaatnttataaaanaatttaaannaaatactcnnanntatttaaaaaaaaaatnaatnannanancnatnnnctnannnaaatnnantntntaannatataatacnatttntanttnnattaanaacttatnaataatnaaanatnantatannnaatntnnaannntnnntcaannnnaatanatanttanaaatatatnaatnaananantaatnaanaantatnntaannnaanatttantaaaanaanntnatcnttantaaataataannnaactaatanatananatntttanatttttnctannantannanntttnnnntnannaanatnnnnccnttatcanannnnantncnttaanantn

SEQ ID NO: 368 - DNA, 1341 bp, Homo Sapiens
  misc_feature (607)..(607): n is a, c, g, or t
  misc_feature (617)..(617): n is a, c, g, or t
  misc_feature (622)..(622): n is a, c, g, or t
  misc_feature (628)..(628): n is a, c, g, or t
  misc_feature (630)..(630): n is a, c, g, or t
  misc_feature (637)..(637): n is a, c, g, or t
  misc_feature (639)..(639): n is a, c, g, or t
  misc_feature (646)..(646): n is a, c, g, or t
  misc_feature (654)..(654): n is a, c, g, or t
  misc_feature (677)..(677): n is a, c, g, or t
  misc_feature (685)..(685): n is a, c, g, or t
  misc_feature (694)..(694): n is a, c, g, or t
  misc_feature (697)..(697): n is a, c, g, or t
  misc_feature (709)..(709): n is a, c, g, or t
  misc_feature (731)..(731): n is a, c, g, or t
  misc_feature (737)..(738): n is a, c, g, or t
  misc_feature (745)..(745): n is a, c, g, or t
  misc_feature (759)..(760): n is a, c, g, or t
  misc_feature (764)..(764): n is a, c, g, or t
  misc_feature (767)..(767): n is a, c, g, or t
  misc_feature (771)..(771): n is a, c, g, or t
  misc_feature (773)..(773): n is a, c, g, or t
  misc_feature (779)..(780): n is a, c, g, or t
  misc_feature (787)..(787): n is a, c, g, or t
  misc_feature (800)..(800): n is a, c, g, or t
  misc_feature (808)..(809): n is a, c, g, or t
  misc_feature (822)..(823): n is a, c, g, or t
  misc_feature (825)..(825): n is a, c, g, or t
  misc_feature (831)..(831): n is a, c, g, or t
  misc_feature (836)..(838): n is a, c, g, or t
  misc_feature (840)..(842): n is a, c, g, or t
  misc_feature (848)..(849): n is a, c, g, or t
  misc_feature (851)..(851): n is a, c, g, or t
  misc_feature (856)..(856): n is a, c, g, or t
  misc_feature (862)..(862): n is a, c, g, or t
  misc_feature (864)..(864): n is a, c, g, or t
  misc_feature (866)..(869): n is a, c, g, or t
  misc_feature (873)..(876): n is a, c, g, or t
  misc_feature (880)..(880): n is a, c, g, or t
  misc_feature (884)..(887): n is a, c, g, or t
  misc_feature (891)..(894): n is a, c, g, or t
  misc_feature (897)..(897): n is a, c, g, or t
  misc_feature (900)..(901): n is a, c, g, or t
  misc_feature (904)..(905): n is a, c, g, or t
  misc_feature (907)..(907): n is a, c, g, or t
  misc_feature (909)..(909): n is a, c, g, or t
  misc_feature (911)..(912): n is a, c, g, or t
  misc_feature (916)..(916): n is a, c, g, or t
  misc_feature (918)..(919): n is a, c, g, or t
  misc_feature (922)..(922): n is a, c, g, or t
  misc_feature (924)..(924): n is a, c, g, or t
  misc_feature (927)..(927): n is a, c, g, or t
  misc_feature (929)..(931): n is a, c, g, or t
  misc_feature (934)..(939): n is a, c, g, or t
  misc_feature (941)..(941): n is a, c, g, or t
  misc_feature (943)..(945): n is a, c, g, or t
  misc_feature (948)..(948): n is a, c, g, or t
  misc_feature (950)..(950): n is a, c, g, or t
  misc_feature (952)..(958): n is a, c, g, or t
  misc_feature (961)..(964): n is a, c, g, or t
  misc_feature (967)..(971): n is a, c, g, or t
  misc_feature (973)..(976): n is a, c, g, or t
  misc_feature (978)..(978): n is a, c, g, or t
  misc_feature (980)..(980): n is a, c, g, or t
  misc_feature (982)..(983): n is a, c, g, or t
  misc_feature (985)..(986): n is a, c, g, or t
  misc_feature (990)..(990): n is a, c, g, or t
  misc_feature (995)..(995): n is a, c, g, or t
  misc_feature (999)..(999): n is a, c, g, or t
  misc_feature (1001)..(1002): n is a, c, g, or t
  misc_feature (1005)..(1009): n is a, c, g, or t
  misc_feature (1011)..(1012): n is a, c, g, or t
  misc_feature (1015)..(1017): n is a, c, g, or t
  misc_feature (1019)..(1021): n is a, c, g, or t
  misc_feature (1028)..(1028): n is a, c, g, or t
  misc_feature (1034)..(1034): n is a, c, g, or t
  misc_feature (1039)..(1040): n is a, c, g, or t
  misc_feature (1045)..(1046): n is a, c, g, or t
  misc_feature (1049)..(1053): n is a, c, g, or t
  misc_feature (1065)..(1069): n is a, c, g, or t
  misc_feature (1071)..(1071): n is a, c, g, or t
  misc_feature (1075)..(1075): n is a, c, g, or t
  misc_feature (1078)..(1080): n is a, c, g, or t
  misc_feature (1082)..(1086): n is a, c, g, or t
  misc_feature (1088)..(1092): n is a, c, g, or t
  misc_feature (1101)..(1104): n is a, c, g, or t
  misc_feature (1109)..(1112): n is a, c, g, or t
  misc_feature (1116)..(1118): n is a, c, g, or t
  misc_feature (1120)..(1123): n is a, c, g, or t
  misc_feature (1127)..(1129): n is a, c, g, or t
  misc_feature (1131)..(1135): n is a, c, g, or t
  misc_feature (1138)..(1138): n is a, c, g, or t
  misc_feature (1140)..(1141): n is a, c, g, or t
  misc_feature (1146)..(1148): n is a, c, g, or t
  misc_feature (1150)..(1150): n is a, c, g, or t
  misc_feature (1155)..(1159): n is a, c, g, or t
  misc_feature (1162)..(1163): n is a, c, g, or t
  misc_feature (1165)..(1165): n is a, c, g, or t
  misc_feature (1167)..(1168): n is a, c, g, or t
  misc_feature (1170)..(1177): n is a, c, g, or t
  misc_feature (1179)..(1181): n is a, c, g, or t
  misc_feature (1185)..(1187): n is a, c, g, or t
  misc_feature (1192)..(1197): n is a, c, g, or t
  misc_feature (1199)..(1201): n is a, c, g, or t
  misc_feature (1204)..(1205): n is a, c, g, or t
  misc_feature (1207)..(1211): n is a, c, g, or t
  misc_feature (1213)..(1213): n is a, c, g, or t
  misc_feature (1215)..(1216): n is a, c, g, or t
  misc_feature (1221)..(1225): n is a, c, g, or t
  misc_feature (1227)..(1227): n is a, c, g, or t
  misc_feature (1229)..(1231): n is a, c, g, or t
  misc_feature (1233)..(1233): n is a, c, g, or t
  misc_feature (1236)..(1242): n is a, c, g, or t
  misc_feature (1244)..(1247): n is a, c, g, or t
  misc_feature (1250)..(1253): n is a, c, g, or t
  misc_feature (1257)..(1259): n is a, c, g, or t
  misc_feature (1261)..(1271): n is a, c, g, or t
  misc_feature (1273)..(1277): n is a, c, g, or t
  misc_feature (1279)..(1283): n is a, c, g, or t
  misc_feature (1285)..(1288): n is a, c, g, or t
  misc_feature (1290)..(1299): n is a, c, g, or t
  misc_feature (1301)..(1313): n is a, c, g, or t
  misc_feature (1316)..(1319): n is a, c, g, or t
  misc_feature (1321)..(1326): n is a, c, g, or t
  misc_feature (1329)..(1337): n is a, c, g, or t
  misc_feature (1340)..(1341): n is a, c, g, or t
tagagagattactatgagaggatcgcatcaccatcaccatcacggatcctatttaggtgacactatagaatcgtcgacccacgcgtccgcccacgcgatccgcccacgcgtccgcccacgcgtccgcccacgcgtccgcggacgcgtgggccgtgctgcagctgctgacctgccacctgcgtgggaccagtgaatgcacgcagctgagggcgctgtgtgccatcgcctccctggggagcagcgacctcctcccccaggagcacatcctcctccgcacccggccgtggctgcaggagctcagcatgggcagcccgggacctgtgaccaacaaggccaccaagatcctgaggcactttgaggcctcctgtgggcagctgtcccctgcccggggcacctcagctgagcctggccccacagccgccctcccaggcccatctgacctgctgaccgacgctgtgcctctccctgggagccaggtcttcctgcagcctctgagttcaaccccggtctcgtcccggagccctgctccctcatctgggatgccgtccagccctgtgcccaccccacccccagatgcctcccccattccagcccccggagaccccancgaggccgangccanactggnanaaagcangnggtgganacctgaanggatcccagggggcacggacagnccaaaganaggccccancanctgtgcgtgganccgcgactccttgtttgctggnatgganntggtggnctgtccccgcctgnntggnggntggngntgctgnngaaaaantctgtcctgattnttccccgnnccccccaaaaatnntnccaaangaaannnannnaaaaanntnttggntaaaancntnnnntttnnnnttcngaannnntgannnnaanggnntgnncntnanntttnannttnanttntnnntgnnnnnntntnnnttntnannnnnnnaannnnaannnnnannnntntnannanntttnatttnaaanannaannnnngnnttnnnannntttcccnattttnttttnnaaaannttnnnnnttttaaattaannnnnanaaanaannnannnnnannnnnttaaaaaannnnatttnnnntttnnngnnnnattnnntnnnnnttntnnaaaannnanttttnnnnnaannanannannnnnnnntnnntatnnnttttnnnnnntnnnttnnannnnntnannaaaannnnntntnnntnttnnnnnnnannnnaannnntttnnntnnnnnnnnnnntnnnnntnnnnntnnnntnnnnnnnnnnannnnnnnnnnnnnttnnnntnnnnnnatnnnnnnnnnttnn

SEQ ID NO: 369 - DNA, 1317 bp, Homo Sapiens
  misc_feature (5)..(5): n is a, c, g, or t
  misc_feature (873)..(873): n is a, c, g, or t
  misc_feature (939)..(939): n is a, c, g, or t
  misc_feature (966)..(966): n is a, c, g, or t
  misc_feature (1021)..(1021): n is a, c, g, or t
  misc_feature (1027)..(1027): n is a, c, g, or t
  misc_feature (1055)..(1055): n is a, c, g, or t
  misc_feature (1083)..(1083): n is a, c, g, or t
  misc_feature (1086)..(1086): n is a, c, g, or t
  misc_feature (1097)..(1097): n is a, c, g, or t
  misc_feature (1099)..(1099): n is a, c, g, or t
  misc_feature (1108)..(1109): n is a, c, g, or t
  misc_feature (1117)..(1117): n is a, c, g, or t
  misc_feature (1122)..(1122): n is a, c, g, or t
  misc_feature (1124)..(1124): n is a, c, g, or t
  misc_feature (1134)..(1134): n is a, c, g, or t
  misc_feature (1140)..(1140): n is a, c, g, or t
  misc_feature (1144)..(1144): n is a, c, g, or t
  misc_feature (1152)..(1152): n is a, c, g, or t
  misc_feature (1169)..(1169): n is a, c, g, or t
  misc_feature (1172)..(1172): n is a, c, g, or t
  misc_feature (1183)..(1183): n is a, c, g, or t
  misc_feature (1191)..(1191): n is a, c, g, or t
  misc_feature (1193)..(1193): n is a, c, g, or t
  misc_feature (1199)..(1200): n is a, c, g, or t
  misc_feature (1203)..(1203): n is a, c, g, or t
  misc_feature (1208)..(1208): n is a, c, g, or t
  misc_feature (1223)..(1223): n is a, c, g, or t
  misc_feature (1234)..(1234): n is a, c, g, or t
  misc_feature (1238)..(1239): n is a, c, g, or t
  misc_feature (1247)..(1247): n is a, c, g, or t
  misc_feature (1250)..(1250): n is a, c, g, or t
  misc_feature (1253)..(1253): n is a, c, g, or t
  misc_feature (1258)..(1259): n is a, c, g, or t
  misc_feature (1263)..(1263): n is a, c, g, or t
  misc_feature (1268)..(1268): n is a, c, g, or t
  misc_feature (1272)..(1272): n is a, c, g, or t
  misc_feature (1279)..(1279): n is a, c, g, or t
  misc_feature (1286)..(1288): n is a, c, g, or t
  misc_feature (1295)..(1295): n is a, c, g, or t
  misc_feature (1297)..(1298): n is a, c, g, or t
  misc_feature (1302)..(1302): n is a, c, g, or t
  misc_feature (1304)..(1304): n is a, c, g, or t
  misc_feature (1314)..(1314): n is a, c, g, or t
  misc_feature (1317)..(1317): n is a, c, g, or t
gaggnaattactatgagaggatcgcatcaccatcaccatcacggatcctatttaggtgacactatagaatcgtcgacccacgcgtccgggaagaggaagagagttacttttggagaggacttaagcccggaagtgtttgatgaatctttgccagcaaatactccattgcgtaaaggaggaacacctgtttgtaaaaaagacttcagtggtctcagttccctgctgcttgagcagtcacctgttcctgagccattacctcaaccagattttgatgacaagggggagaatcttgaaaacatagaaccacttcaagtatcatttgccgttctcagttctcctaataaatcatcaatctctgagaccctttcaggcactgatacctttagttcttcaaataaccatgagaaaatatcctctcctaaagttggtagaataacaaggacttctaacagaagaaatcaattggtcagtgttgtagaagagagtgtttgcaacttattgaatacagaagttcagccttgtaaagaaaagaaaattaataggaggaagtctcaagaaacaaagtgtacaaagagagcacttcctaagaagagtcaggttttaaaaagttgcagaaagaagaaaggaaagggaaagaaaagtgttcagaaatctttatatggggaaagagacattgcttctaagaagcccctcctcagtcctattcccgagctgcctgaagtccctgagatgacaccttccattccgagcatccgaagactgggttcaggttatttcagttcaaatggcaaactggaagaagtgaagactcctaaaaatccagtgaaaagaaaggatcttttgcgtcatgacccagatttgcatatgcatcanggctatgataaatatgatgtctctgaattctgctcttatataaaaagttcctcatcgcttggcaangctacttctgatgaagatccaaatacnaatataatgaacattaatggaaaataaaaatattccaaagcaaaaaataagtcanaagggnaaatgaaccaaaagctggaactgacagnccggttctggggctcctaaactgaaaancgngggcatccaanantcccaaacnngctctgancctgnancagggtcaanaatttncggnggggggcnaaaggcaaaaaaccttngcngttctttaaantttccccnanttaacnnaanggggnaaaaaaggagacttnttaggaccccnaaannaaacgcangcnccntttanngccnattcnaaanaaggttnttttttnnnaagtctntnnaaancnaaaattcaanccn

SEQ ID NO: 370 - DNA, 1350 bp, Homo Sapiens
  misc_feature (908)..(908): n is a, c, g, or t
  misc_feature (911)..(911): n is a, c, g, or t
  misc_feature (926)..(926): n is a, c, g, or t
  misc_feature (961)..(961): n is a, c, g, or t
  misc_feature (966)..(966): n is a, c, g, or t
  misc_feature (972)..(972): n is a, c, g, or t
  misc_feature (1005)..(1005): n is a, c, g, or t
  misc_feature (1036)..(1037): n is a, c, g, or t
  misc_feature (1041)..(1041): n is a, c, g, or t
  misc_feature (1057)..(1057): n is a, c, g, or t
  misc_feature (1063)..(1063): n is a, c, g, or t
  misc_feature (1077)..(1077): n is a, c, g, or t
  misc_feature (1083)..(1083): n is a, c, g, or t
  misc_feature (1094)..(1094): n is a, c, g, or t
  misc_feature (1100)..(1100): n is a, c, g, or t
  misc_feature (1104)..(1104): n is a, c, g, or t
  misc_feature (1113)..(1113): n is a, c, g, or t
  misc_feature (1122)..(1122): n is a, c, g, or t
  misc_feature (1134)..(1134): n is a, c, g, or t
  misc_feature (1145)..(1145): n is a, c, g, or t
  misc_feature (1148)..(1149): n is a, c, g, or t
  misc_feature (1165)..(1165): n is a, c, g, or t
  misc_feature (1167)..(1168): n is a, c, g, or t
  misc_feature (1174)..(1174): n is a, c, g, or t
  misc_feature (1185)..(1185): n is a, c, g, or t
  misc_feature (1188)..(1189): n is a, c, g, or t
  misc_feature (1200)..(1201): n is a, c, g, or t
  misc_feature (1216)..(1216): n is a, c, g, or t
  misc_feature (1220)..(1221): n is a, c, g, or t
  misc_feature (1223)..(1223): n is a, c, g, or t
  misc_feature (1225)..(1226): n is a, c, g, or t
  misc_feature (1237)..(1237): n is a, c, g, or t
  misc_feature (1243)..(1243): n is a, c, g, or t
  misc_feature (1246)..(1246): n is a, c, g, or t
  misc_feature (1249)..(1249): n is a, c, g, or t
  misc_feature (1251)..(1252): n is a, c, g, or t
  misc_feature (1254)..(1255): n is a, c, g, or t
  misc_feature (1262)..(1263): n is a, c, g, or t
  misc_feature (1267)..(1267): n is a, c, g, or t
  misc_feature (1271)..(1271): n is a, c, g, or t
  misc_feature (1275)..(1276): n is a, c, g, or t
  misc_feature (1280)..(1280): n is a, c, g, or t
  misc_feature (1285)..(1286): n is a, c, g, or t
  misc_feature (1288)..(1288): n is a, c, g, or t
  misc_feature (1299)..(1302): n is a, c, g, or t
  misc_feature (1313)..(1313): n is a, c, g, or t
  misc_feature (1317)..(1317): n is a, c, g, or t
  misc_feature (1321)..(1321): n is a, c, g, or t
  misc_feature (1328)..(1328): n is a, c, g, or t
  misc_feature (1331)..(1332): n is a, c, g, or t
  misc_feature (1337)..(1337): n is a, c, g, or t
tagagaaattaactatgagaggatcgcatcaccatcaccatcacggatcctatttaggtgacactatagaatcgtcgacccacgcgtccgcccacgcgtccgtcttgacaaccaagggcctccgtctggatttccaaggaagaatttcctctgaagcaccggaacttgctactaccagcaccatgccctaccaatatccagcactgaccccggagcagaagaaggagctgtctgacatcgctcaccgcatcgtggcacctggcaagggcatcctggctgcagatgagtccactgggagcattgccaagcggctgcagtccattggcaccgagaacaccgaggagaaccggcgcttctaccgccagctgctgctgacagctgacgaccgcgtgaacccctgcattgggggtgtcatcctcttccatgagacactctaccagaaggcggatgatgggcgtcccttcccccaagttatcaaatccaagggcggtgttgtgggcatcaaggtagataagggcgtggtccccctggcagggacaaatggcgagactaccacccaagggttggatgggctgtctgagcgctgtgcccagtacaagaaggacggagctgacttcgccaagtggcgttgtgtgctgaagattggggaacacaccccctcagccctcgccatcatggaaaatgccaatgttctggcccgttatgccagtatctgccagcagaatggcattgtgcccatcgtggagcctgagatcctccctgatggggaccatgacttgaagcgctgccagtatgtgaccgagaaggtgctggctgctgtctacaaggctctgagtgaccaccacatctacctggaaggcaccttgctgaagcccaacatggtcaccccaggccatgcttgcactcanaanttttctcatgagganattgccatggcgaccgtcacagcgctgcgccgcanagtgncccccngctgtcctgggatcaccttcctgtctggaggcnaaatgagaagaagcgtccatcacctcatgcnntaanagtgcccctgctgaancctggncctgacttttctanggcgancctgaaggctntgcctnaagnctggggggnaaaagaaancttaagctgccnagaagaatttnaannaacctggcaaaacttncnnttaagnaaaaaattcanggnnaggtggggttnncaaaaatcctttttntaanncntnnaaggggggttncgggtnccnaantnngnntgccccnnttanaaancccnncggnccggnntncccctttttcnnnnggggggggggngganaaancccctcnccnnaaaantttggaaaaaaaa

SEQ ID NO: 371 - DNA, 1308 bp, Homo Sapiens
  misc_feature (1)..(1): n is a, c, g, or t
  misc_feature (850)..(850): n is a, c, g, or t
  misc_feature (892)..(892): n is a, c, g, or t
  misc_feature (951)..(951): n is a, c, g, or t
  misc_feature (963)..(963): n is a, c, g, or t
  misc_feature (981)..(981): n is a, c, g, or t
  misc_feature (1019)..(1019): n is a, c, g, or t
  misc_feature (1029)..(1029): n is a, c, g, or t
  misc_feature (1032)..(1032): n is a, c, g, or t
  misc_feature (1037)..(1037): n is a, c, g, or t
  misc_feature (1043)..(1043): n is a, c, g, or t
  misc_feature (1051)..(1051): n is a, c, g, or t
  misc_feature (1058)..(1058): n is a, c, g, or t
  misc_feature (1060)..(1060): n is a, c, g, or t
  misc_feature (1077)..(1077): n is a, c, g, or t
  misc_feature (1085)..(1085): n is a, c, g, or t
  misc_feature (1102)..(1102): n is a, c, g, or t
  misc_feature (1108)..(1108): n is a, c, g, or t
  misc_feature (1110)..(1110): n is a, c, g, or t
  misc_feature (1120)..(1120): n is a, c, g, or t
  misc_feature (1144)..(1144): n is a, c, g, or t
  misc_feature (1154)..(1154): n is a, c, g, or t
  misc_feature (1156)..(1156): n is a, c, g, or t
  misc_feature (1159)..(1160): n is a, c, g, or t
  misc_feature (1163)..(1163): n is a, c, g, or t
  misc_feature (1171)..(1171): n is a, c, g, or t
  misc_feature (1177)..(1177): n is a, c, g, or t
  misc_feature (1182)..(1182): n is a, c, g, or t
  misc_feature (1185)..(1185): n is a, c, g, or t
  misc_feature (1187)..(1187): n is a, c, g, or t
  misc_feature (1194)..(1194): n is a, c, g, or t
  misc_feature (1201)..(1201): n is a, c, g, or t
  misc_feature (1208)..(1210): n is a, c, g, or t
  misc_feature (1216)..(1216): n is a, c, g, or t
  misc_feature (1220)..(1220): n is a, c, g, or t
  misc_feature (1227)..(1229): n is a, c, g, or t
  misc_feature (1231)..(1231): n is a, c, g, or t
  misc_feature (1234)..(1235): n is a, c, g, or t
  misc_feature (1237)..(1238): n is a, c, g, or t
  misc_feature (1240)..(1240): n is a, c, g, or t
  misc_feature (1249)..(1250): n is a, c, g, or t
  misc_feature (1252)..(1252): n is a, c, g, or t
  misc_feature (1257)..(1258): n is a, c, g, or t
  misc_feature (1260)..(1260): n is a, c, g, or t
  misc_feature (1264)..(1264): n is a, c, g, or t
  misc_feature (1266)..(1266): n is a, c, g, or t
  misc_feature (1268)..(1268): n is a, c, g, or t
  misc_feature (1276)..(1276): n is a, c, g, or t
  misc_feature (1278)..(1278): n is a, c, g, or t
  misc_feature (1282)..(1282): n is a, c, g, or t
  misc_feature (1296)..(1296): n is a, c, g, or t
  misc_feature (1305)..(1305): n is a, c, g, or t
  misc_feature (1307)..(1308): n is a, c, g, or t
naattagagaaattactatgagaggatcgcatcaccatcaccatcacggatcctatttaggtgacactatagaatcgtcgacccacgcgtccgccggaaagcagcggcccgcggcgcgctctggcgtgaagggccggtacgtgagggggaggcctggcccgcggacccggctcccagctcgggcagttcttacagcccagctctgtgctctgctctctgctggctccaggaggggtcctcactcgctgaccacactgacctcaggaccaagggaacaaaacacagcaggggcaatccatccggtccacggagaagtgctaaaccccaaagggtaaatgagattcccacaggaggagcagggaggagacaacaggcagggtggagggaacagcatgaggaacagcatttgagcccagcgtgtgtggcctccatgtgctgaatgcgtactggataccaagcttgctctacggaggccctgtgaaggtggctgtggatcacagatatcctcagctctctccagagctcaacacagtaccagatgctccagaaatgtttgctgaactgaatttgattggaaaggaaaacagagccccaggcctgcgcggtggctcacgtctataatcccagcactgtgggaggccgaggcagacggatcacttgaggtcccagctgcagggcagccatgagcctggtggcctgtgagtgcctgcccagccccggcctggagcctgagccttgctcacgagcacggtcccaagctcacgtgtacctggagcagattcgcaacagggtggctctgggagtgcctgacatgacaaaacgtgactatctggtggatgcggccacgcanatccggctggccctggagcgcgatgttagtgaggactatgangcggccttcaccactatcaaaatggcgtggacgtgctgctccgtggcatacacgttgancccaacaaggancgacgtgaggctgtgaanctgaaattaccaatactgcggcggcaaagaaatttcantgcactgcancgncgctncctaantgagtcgnataactnantactaactggatctgtnaaaaatcngtatgactcaaactccntgattntnaaacctcgtnccccgggtttttttgggaaatcanctacttgggnanttnngantaggactnaatggnaaaanccngnaaccccntttaatnccagggnnnaaaaantttnggttttnnntntcnngnncnaacaacctnncngaatnncntttnancnaaaaaaanantttngctttttttttccngaaaacccnann

SEQ ID NO: 372 - DNA, 1389 bp, Homo Sapiens
  misc_feature (828)..(828): n is a, c, g, or t
  misc_feature (849)..(849): n is a, c, g, or t
  misc_feature (868)..(868): n is a, c, g, or t
  misc_feature (871)..(871): n is a, c, g, or t
  misc_feature (915)..(915): n is a, c, g, or t
  misc_feature (989)..(989): n is a, c, g, or t
  misc_feature (1003)..(1003): n is a, c, g, or t
  misc_feature (1016)..(1016): n is a, c, g, or t
  misc_feature (1032)..(1032): n is a, c, g, or t
  misc_feature (1050)..(1050): n is a, c, g, or t
  misc_feature (1067)..(1067): n is a, c, g, or t
  misc_feature (1072)..(1072): n is a, c, g, or t
  misc_feature (1083)..(1084): n is a, c, g, or t
  misc_feature (1090)..(1090): n is a, c, g, or t
  misc_feature (1092)..(1092): n is a, c, g, or t
  misc_feature (1099)..(1099): n is a, c, g, or t
  misc_feature (1106)..(1106): n is a, c, g, or t
  misc_feature (1115)..(1115): n is a, c, g, or t
  misc_feature (1124)..(1124): n is a, c, g, or t
  misc_feature (1149)..(1150): n is a, c, g, or t
  misc_feature (1191)..(1192): n is a, c, g, or t
  misc_feature (1200)..(1200): n is a, c, g, or t
  misc_feature (1209)..(1209): n is a, c, g, or t
  misc_feature (1221)..(1221): n is a, c, g, or t
  misc_feature (1223)..(1223): n is a, c, g, or t
  misc_feature (1225)..(1225): n is a, c, g, or t
  misc_feature (1228)..(1228): n is a, c, g, or t
  misc_feature (1249)..(1250): n is a, c, g, or t
  misc_feature (1256)..(1256): n is a, c, g, or t
  misc_feature (1259)..(1259): n is a, c, g, or t
  misc_feature (1263)..(1263): n is a, c, g, or t
  misc_feature (1271)..(1271): n is a, c, g, or t
  misc_feature (1277)..(1277): n is a, c, g, or t
  misc_feature (1284)..(1284): n is a, c, g, or t
  misc_feature (1294)..(1294): n is a, c, g, or t
  misc_feature (1298)..(1298): n is a, c, g, or t
  misc_feature (1301)..(1301): n is a, c, g, or t
  misc_feature (1304)..(1304): n is a, c, g, or t
  misc_feature (1311)..(1311): n is a, c, g, or t
  misc_feature (1313)..(1313): n is a, c, g, or t
  misc_feature (1320)..(1320): n is a, c, g, or t
  misc_feature (1323)..(1323): n is a, c, g, or t
  misc_feature (1326)..(1326): n is a, c, g, or t
  misc_feature (1333)..(1333): n is a, c, g, or t
  misc_feature (1335)..(1335): n is a, c, g, or t
  misc_feature (1339)..(1339): n is a, c, g, or t
  misc_feature (1341)..(1341): n is a, c, g, or t
  misc_feature (1344)..(1345): n is a, c, g, or t
  misc_feature (1348)..(1353): n is a, c, g, or t
  misc_feature (1356)..(1356): n is a, c, g, or t
  misc_feature (1360)..(1360): n is a, c, g, or t
  misc_feature (1363)..(1364): n is a, c, g, or t
  misc_feature (1372)..(1372): n is a, c, g, or t
  misc_feature (1378)..(1378): n is a, c, g, or t
  misc_feature (1382)..(1383): n is a, c, g, or t
tagagaaattactatgagaggatcgcatcaccatcaccatcacggatcctatttaggtgacactatagaatcgtcgacccacgcgtccgcgatttcgtcggtggtaggctgctaccatgaggttgaatcagaacaccttgctgctggggaagaaggtggtccttgtaccctacacctcggagcatgtgcccagcaggtaccacgagtggatgaaatcagaggagctgcagcgtttgacagcctcggagccgctgaccctggagcaggagtatgccatgcagtgcagctggcaggaagatgcagacaagtgtaccttcattgtgctggatgccgagaagtggcaggcccagccaggcgccaccgaagagagctgcatggtgggagatgtgaacctcttcctcacagatctagaagacctcaccttgggggagatcgaggtcatgattgcagagcccagctgcaggggtaagggccttggcactgaggccgttctcgcgatgctgtcttacggtaagaaagtgtgagcagacaatgcgggaagtgggcaggccccaggtgaactttgttcaggtgtgagggttgggggcaggtgaaggttcctcctctgcagcttgggacaggagggtgggggcaggcgcctccttacttgcccctgtctcatctcctctgcgaggagtgaccacgctaggtctgaccaagtttgaggctaaaattgggcaaggaaatgaaccaagcatccggatgttccagaaacttcactttgagcaggtggctacgagcagtgtttttcaggaggtgaccctcagactgacagtgagtgagtccgancatcagtggcttctggagcanaccagccacgtggaaaganaanccttacagagatgggtcggcagaaccctgctgatggctgggccnttgtgggcacccctctgtgtgagcaggggtgttgggcccatacacttcaaaaacaaaaccctgcactgggaaantgctcctggcccangctgggaatcacntttcaaggccttcaantctggcggggcttgctgngcctccctccacctagnggggnggctgaacaannccaggncnaggccanttccttntcccctccngccaaaccnaaaccaaatttagaaactggaatgnnggcagggatcctggaaatttcggataaaggggaaccgaagnncggggacntgaaaatgntgggagggaagncntntcnttaaaccaaaaggttccccgnntggaanaancccngccaaccntttctnatttccntggccggggnaaanacnaanccccccncntttcccnggnttntcttttntnaaangngtnnccnnnnnnccnaaanggnnaaaggggncccccncccnncccccc

SEQ ID NO: 373 - DNA, 1422 bp, Homo Sapiens
  misc_feature (1)..(2): n is a, c, g, or t
  misc_feature (884)..(884): n is a, c, g, or t
  misc_feature (901)..(901): n is a, c, g, or t
  misc_feature (921)..(921): n is a, c, g, or t
  misc_feature (961)..(961): n is a, c, g, or t
  misc_feature (972)..(972): n is a, c, g, or t
  misc_feature (981)..(981): n is a, c, g, or t
  misc_feature (1019)..(1019): n is a, c, g, or t
  misc_feature (1061)..(1061): n is a, c, g, or t
  misc_feature (1063)..(1065): n is a, c, g, or t
  misc_feature (1070)..(1070): n is a, c, g, or t
  misc_feature (1081)..(1081): n is a, c, g, or t
  misc_feature (1094)..(1094): n is a, c, g, or t
  misc_feature (1097)..(1097): n is a, c, g, or t
  misc_feature (1106)..(1107): n is a, c, g, or t
  misc_feature (1110)..(1110): n is a, c, g, or t
  misc_feature (1113)..(1113): n is a, c, g, or t
  misc_feature (1130)..(1130): n is a, c, g, or t
  misc_feature (1144)..(1144): n is a, c, g, or t
  misc_feature (1173)..(1173): n is a, c, g, or t
  misc_feature (1181)..(1181): n is a, c, g, or t
  misc_feature (1197)..(1197): n is a, c, g, or t
  misc_feature (1201)..(1201): n is a, c, g, or t
  misc_feature (1205)..(1205): n is a, c, g, or t
  misc_feature (1218)..(1218): n is a, c, g, or t
  misc_feature (1221)..(1221): n is a, c, g, or t
  misc_feature (1233)..(1233): n is a, c, g, or t
  misc_feature (1263)..(1263): n is a, c, g, or t
  misc_feature (1267)..(1267): n is a, c, g, or t
  misc_feature (1271)..(1271): n is a, c, g, or t
  misc_feature (1285)..(1285): n is a, c, g, or t
  misc_feature (1291)..(1291): n is a, c, g, or t
  misc_feature (1295)..(1295): n is a, c, g, or t
  misc_feature (1302)..(1302): n is a, c, g, or t
  misc_feature (1304)..(1304): n is a, c, g, or t
  misc_feature (1313)..(1313): n is a, c, g, or t
  misc_feature (1316)..(1316): n is a, c, g, or t
  misc_feature (1322)..(1323): n is a, c, g, or t
  misc_feature (1352)..(1352): n is a, c, g, or t
  misc_feature (1372)..(1372): n is a, c, g, or t
  misc_feature (1379)..(1379): n is a, c, g, or t
  misc_feature (1386)..(1386): n is a, c, g, or t
  misc_feature (1389)..(1392): n is a, c, g, or t
  misc_feature (1395)..(1395): n is a, c, g, or t
  misc_feature (1402)..(1402): n is a, c, g, or t
  misc_feature (1406)..(1406): n is a, c, g, or t
  misc_feature (1413)..(1413): n is a, c, g, or t
nntagagaaattactatgagaggatcgcatcaccatcaccatcacggatcctatttaggtgacactatagaatcgtcgacccacgcgtccgggaggcgagcgcgaccggaagtccggtcactctcgcgaggccccagagagcaggcgctgggcagtgtggaggtcgttggagtcacttccgcgtcaccagctcctgtgcctgccagtcggtgcccctcccgctccagccatgctctccgccctcgcccggcctgccagcgctgctctccgccgcagcttcagcacctcggcccagaacaatgctaaagtagctgtgctaggggcctctggaggcatcgggcagccactttcacttctcctgaagaacagccccttggtgagccgcctgaccctctatgatatcgcgcacacacccggagtggccgcagatctgagccacatcgagaccaaagccgctgtgaaaggctacctcggacctgaacagctgcctgactgcctgaaaggttgtgatgtggtagttattccggctggagtccccagaaagccaggcatgacccgggacgacctgttcaacaccaatgccacgattgtggccaccctgaccgctgcctgtgcccagcactgcccggaagccatgatctgcgtcattgccaatccggttaattccaccatccccatcacagcagaagttttcaagaagcatggagtgtacaaccccaacaaaatcttcggcgtgacgaccctggacatcgtcagagccaacacctttgttgcagagctgaagggtttggatccagctcgagtcaacgtccctgtcattggtggccatgctgggaagaccatcatccccctgatctctcagtgcacccccaaggtggactttnccccaggaccagctganagcactcactgggcggaatncaggaagccggcacggaagtggtcaaggctaaagccggancaggctctgcnaccctctcnatggcgttatgccggcgcccgcttttttcttctccctnggggatgcaatgaatggaaagaaagtgttggggaaatgttcntnnnttaantcacaggaaanggaatgtacttanttntccacaccnntgntgnttgggaaaaaggcatcnaaaaaaactgggcntcgcaaaatttccttttttgagaaaaaanaaattcgnagcctccccaactaangccncctnaaaagggaaaatnttngaaaccttaaanaaccccttgaagggggccattttttatttnaagnattnttccttaaaacttnaaaaantttntttattntngggaaaaangantaacanngcccaaatggggggcggggggcaaaaacnctttttaaaaaaaaaagggncccaagnaaaaaanaannnnctnaaaaaanaacntttaaanggcgggttg

SEQ ID NO: 374 - DNA, 1355 bp, Homo Sapiens
  misc_feature (825)..(825): n is a, c, g, or t
  misc_feature (848)..(848): n is a, c, g, or t
  misc_feature (857)..(857): n is a, c, g, or t
  misc_feature (861)..(861): n is a, c, g, or t
  misc_feature (866)..(866): n is a, c, g, or t
  misc_feature (896)..(896): n is a, c, g, or t
  misc_feature (901)..(901): n is a, c, g, or t
  misc_feature (936)..(936): n is a, c, g, or t
  misc_feature (938)..(938): n is a, c, g, or t
  misc_feature (954)..(954): n is a, c, g, or t
  misc_feature (958)..(958): n is a, c, g, or t
  misc_feature (962)..(962): n is a, c, g, or t
  misc_feature (977)..(977): n is a, c, g, or t
  misc_feature (981)..(981): n is a, c, g, or t
  misc_feature (983)..(983): n is a, c, g, or t
  misc_feature (992)..(992): n is a, c, g, or t
  misc_feature (997)..(997): n is a, c, g, or t
  misc_feature (1013)..(1013): n is a, c, g, or t
  misc_feature (1029)..(1029): n is a, c, g, or t
  misc_feature (1038)..(1038): n is a, c, g, or t
  misc_feature (1040)..(1040): n is a, c, g, or t
  misc_feature (1043)..(1043): n is a, c, g, or t
  misc_feature (1049)..(1049): n is a, c, g, or t
  misc_feature (1062)..(1062): n is a, c, g, or t
  misc_feature (1064)..(1065): n is a, c, g, or t
  misc_feature (1070)..(1070): n is a, c, g, or t
  misc_feature (1073)..(1073): n is a, c, g, or t
  misc_feature (1082)..(1082): n is a, c, g, or t
  misc_feature (1088)..(1088): n is a, c, g, or t
  misc_feature (1093)..(1094): n is a, c, g, or t
  misc_feature (1105)..(1105): n is a, c, g, or t
  misc_feature (1110)..(1110): n is a, c, g, or t
  misc_feature (1112)..(1112): n is a, c, g, or t
  misc_feature (1118)..(1118): n is a, c, g, or t
  misc_feature (1121)..(1121): n is a, c, g, or t
  misc_feature (1128)..(1128): n is a, c, g, or t
  misc_feature (1139)..(1139): n is a, c, g, or t
  misc_feature (1146)..(1147): n is a, c, g, or t
  misc_feature (1151)..(1151): n is a, c, g, or t
  misc_feature (1154)..(1156): n is a, c, g, or t
  misc_feature (1158)..(1161): n is a, c, g, or t
  misc_feature (1163)..(1163): n is a, c, g, or t
  misc_feature (1165)..(1165): n is a, c, g, or t
  misc_feature (1170)..(1171): n is a, c, g, or t
  misc_feature (1179)..(1179): n is a, c, g, or t
  misc_feature (1181)..(1182): n is a, c, g, or t
  misc_feature (1187)..(1189): n is a, c, g, or t
  misc_feature (1191)..(1191): n is a, c, g, or t
  misc_feature (1194)..(1194): n is a, c, g, or t
  misc_feature (1196)..(1197): n is a, c, g, or t
  misc_feature (1207)..(1207): n is a, c, g, or t
  misc_feature (1209)..(1209): n is a, c, g, or t
  misc_feature (1211)..(1211): n is a, c, g, or t
  misc_feature (1214)..(1214): n is a, c, g, or t
  misc_feature (1216)..(1216): n is a, c, g, or t
  misc_feature (1222)..(1224): n is a, c, g, or t
  misc_feature (1230)..(1230): n is a, c, g, or t
  misc_feature (1232)..(1232): n is a, c, g, or t
  misc_feature (1235)..(1235): n is a, c, g, or t
  misc_feature (1239)..(1243): n is a, c, g, or t
  misc_feature (1246)..(1247): n is a, c, g, or t
  misc_feature (1252)..(1252): n is a, c, g, or t
  misc_feature (1255)..(1267): n is a, c, g, or t
  misc_feature (1269)..(1273): n is a, c, g, or t
  misc_feature (1277)..(1277): n is a, c, g, or t
  misc_feature (1282)..(1301): n is a, c, g, or t
  misc_feature (1304)..(1304): n is a, c, g, or t
  misc_feature (1307)..(1309): n is a, c, g, or t
  misc_feature (1314)..(1314): n is a, c, g, or t
  misc_feature (1325)..(1326): n is a, c, g, or t
  misc_feature (1332)..(1334): n is a, c, g, or t
  misc_feature (1337)..(1341): n is a, c, g, or t
  misc_feature (1347)..(1348): n is a, c, g, or t
  misc_feature (1355)..(1355): n is a, c, g, or t
gagaaattactatgagaggatcgcatcaccatcaccatcacggatcctatttaggtgacactatagaatcgtcgacccacgcgtccgggatgttgactcccctgcagcctaggcgacaggacactcttgtattaagcagagaagtagcaccgttgcatctgtgttgggaaggtccactcagcagccatggacggcaggccggaagggggctgggtagaggccaggggggctgctcaaaatggccaggacagaagcgaggaggcctgaactggagatgaacagcggcagagcctcaccttctcagagcctccatttgatcatttgaaaaatggggtggtgaaagatacatcacggggctgtttgttagttcacttcagtaacgttcgctgtgcgcttccacgtgcctggatttgagagatgtgcttggtggatgtagctcttttcactgagtgtttcccaggcagaaggaggtggagggaggggacgaggccagcttgggtttgtcacctgccttgtgctccttaacccttgtttcttgggccttgtcttcccttttcacctgggctgccctcccctggttctggcaggttctggggtgtttcacctgttttttttctaggagcacccctggcctgcttcccgtctgcctgctcggatgctgctgctggcttcctgctgttttgaggcctctgatgctggaagaacaggaggaagccagctccccacagctgtgtcctcttccttccccaggagatgtgggttccttcgtgctgaagttagtggagggccttcagggccagacctgggccccagactgggtggagnagctgcgggaagccgaccggcanaaggagcanaccntttcngtggggcctgggtggaatggatgtgggaanggggnttcccggcaaacctgctgccaaccctggtgacctncnctgtcctgtcccaggnaaangcancgatgcctgtggccnaccncntgaacccantgcangtgctgcacctggtgnagaaaccctacctganaactcaatncnggngggggnatggggggaactncnngggcntgntgcccattnggaaanccccnnggccccctggnctggntnaatccnggnaaagaanggccccccccntgggganngggnccnnncnnnngnanccttnncccccccngnntttgnnncnttnannggcctttggnancnggnantggggnnnattttncnttnggcnnnnnttnnccccnaannnnnnnnnnnnncnnnnnttgnaaaannnnnnnnnnnnnnnnnnnnccnaannnggggnccccccaaaanngggggnnnggnnnnntttttnnccccccn

SEQ ID NO: 375 - DNA, 1423 bp, Homo Sapiens
  misc_feature (1)..(1): n is a, c, g, or t
  misc_feature (880)..(880): n is a, c, g, or t
  misc_feature (890)..(890): n is a, c, g, or t
  misc_feature (951)..(951): n is a, c, g, or t
  misc_feature (960)..(960): n is a, c, g, or t
  misc_feature (964)..(964): n is a, c, g, or t
  misc_feature (971)..(971): n is a, c, g, or t
  misc_feature (973)..(973): n is a, c, g, or t
  misc_feature (989)..(989): n is a, c, g, or t
  misc_feature (996)..(996): n is a, c, g, or t
  misc_feature (998)..(998): n is a, c, g, or t
  misc_feature (1013)..(1013): n is a, c, g, or t
  misc_feature (1020)..(1020): n is a, c, g, or t
  misc_feature (1023)..(1023): n is a, c, g, or t
  misc_feature (1027)..(1027): n is a, c, g, or t
  misc_feature (1032)..(1032): n is a, c, g, or t
  misc_feature (1050)..(1050): n is a, c, g, or t
  misc_feature (1054)..(1054): n is a, c, g, or t
  misc_feature (1068)..(1068): n is a, c, g, or t
  misc_feature (1087)..(1087): n is a, c, g, or t
  misc_feature (1090)..(1090): n is a, c, g, or t
  misc_feature (1095)..(1095): n is a, c, g, or t
  misc_feature (1106)..(1106): n is a, c, g, or t
  misc_feature (1114)..(1114): n is a, c, g, or t
  misc_feature (1118)..(1118): n is a, c, g, or t
  misc_feature (1123)..(1123): n is a, c, g, or t
  misc_feature (1128)..(1128): n is a, c, g, or t
  misc_feature (1144)..(1144): n is a, c, g, or t
  misc_feature (1147)..(1147): n is a, c, g, or t
  misc_feature (1150)..(1151): n is a, c, g, or t
  misc_feature (1158)..(1158): n is a, c, g, or t
  misc_feature (1161)..(1161): n is a, c, g, or t
  misc_feature (1166)..(1166): n is a, c, g, or t
  misc_feature (1171)..(1171): n is a, c, g, or t
  misc_feature (1178)..(1178): n is a, c, g, or t
  misc_feature (1191)..(1192): n is a, c, g, or t
  misc_feature (1212)..(1212): n is a, c, g, or t
  misc_feature (1226)..(1226): n is a, c, g, or t
  misc_feature (1233)..(1233): n is a, c, g, or t
  misc_feature (1252)..(1252): n is a, c, g, or t
  misc_feature (1268)..(1268): n is a, c, g, or t
  misc_feature (1270)..(1270): n is a, c, g, or t
  misc_feature (1272)..(1272): n is a, c, g, or t
  misc_feature (1274)..(1274): n is a, c, g, or t
  misc_feature (1283)..(1283): n is a, c, g, or t
  misc_feature (1295)..(1295): n is a, c, g, or t
  misc_feature (1303)..(1303): n is a, c, g, or t
  misc_feature (1305)..(1305): n is a, c, g, or t
  misc_feature (1308)..(1308): n is a, c, g, or t
  misc_feature (1313)..(1313): n is a, c, g, or t
  misc_feature (1319)..(1319): n is a, c, g, or t
  misc_feature (1325)..(1325): n is a, c, g, or t
  misc_feature (1334)..(1334): n is a, c, g, or t
  misc_feature (1340)..(1340): n is a, c, g, or t
  misc_feature (1343)..(1343): n is a, c, g, or t
  misc_feature (1356)..(1356): n is a, c, g, or t
  misc_feature (1358)..(1358): n is a, c, g, or t
  misc_feature (1360)..(1360): n is a, c, g, or t
  misc_feature (1369)..(1369): n is a, c, g, or t
  misc_feature (1382)..(1382): n is a, c, g, or t
  misc_feature (1404)..(1404): n is a, c, g, or t
  misc_feature (1406)..(1407): n is a, c, g, or t
  misc_feature (1411)..(1411): n is a, c, g, or t
  misc_feature (1420)..(1420): n is a, c, g, or t
naatagagagattactatgagaggatcgcatcaccatcaccatcacggatcctatttaggtgacactatagaatcgtcgacccacgcgtccgatggaaaagattttgcatctagaggaattgaaatgtccgaagttcgcttgaatttagacaagatgatggagcagaagagtactgcagtaaaagctttaacaggtggaattgcccacttattcaaacagaataaggttgttcatgtcaatggatatggaaagataactggcaaaaatcaagtcactgctacgaaagctgatggcggcactcaggttattgatacaaagaacattcttatagccacgggttcagaagttactccttttcctggaatcacgatagatgaagatacaatagtgtcatctacaggtgctttatctttaaaaaaagttccagaaaagatggttgttattggtgcaggagtaataggtgtagaattgggttcagtttggcaaagacttggtgcagatgtgacagcagttgaatttttaggtcatgtaggtggagttggaattgatatggagatatctaaaaactttcaacgcatccttcaaaaacaggggtttaaatttaaattgaatacaaaggttactggtgctaccaagaagtcagatggaaaaattgatgtttctattgaagctgcttctggtggtaaagctgaagttatcacttgtgatgtactcttggtttgcattggccgacgaccctttactaagaatttgggactagaagagctgggaattgaactagatcccagaggtagaattccagtcaataccagatttcaaactaaaaattccaaatatctatgccattggtgatgtagttgctggtccaatgctggctcncaaagcagangatgaaggcattatctgtgttgaaggaatggctggtggtgctgtgcacattgactacaatngtgtgccancagngattacncnccccctgaagttgctngggttgncnaatccaaaaaaccanttgaaanaanaggntatgnatacaaagttgggaaatncccntttgctgctacgcnaaactaaacaaatgctganccnaatgncaggggaaaancctgggcnaaanccccnaacanaatccggggacccatntcntgnnccgggcnggnaaaangaaangaaaccncccctgcttgganntggacccccgggaaaaaacnaagccttctgcccnccccctnccaaacttttaaaacaacnggcccccttggcaacncncntngaaaaaaanaattttttttcnaatccggncnttngaaancccccnaagaantcccccccnaattcnganaaaaaacttgggntnanggggaagancccccccttttanttttttttccccaaaaaaaacntnncccnccccccttncca

SEQ ID NO: 376 - DNA, 1400 bp, Homo Sapiens
  misc_feature (873)..(873): n is a, c, g, or t
  misc_feature (920)..(920): n is a, c, g, or t
  misc_feature (927)..(927): n is a, c, g, or t
  misc_feature (933)..(933): n is a, c, g, or t
  misc_feature (936)..(936): n is a, c, g, or t
  misc_feature (965)..(965): n is a, c, g, or t
  misc_feature (991)..(991): n is a, c, g, or t
  misc_feature (993)..(993): n is a, c, g, or t
  misc_feature (1001)..(1001): n is a, c, g, or t
  misc_feature (1004)..(1004): n is a, c, g, or t
  misc_feature (1012)..(1012): n is a, c, g, or t
  misc_feature (1027)..(1027): n is a, c, g, or t
  misc_feature (1042)..(1042): n is a, c, g, or t
  misc_feature (1044)..(1044): n is a, c, g, or t
  misc_feature (1053)..(1053): n is a, c, g, or t
  misc_feature (1055)..(1055): n is a, c, g, or t
  misc_feature (1059)..(1059): n is a, c, g, or t
  misc_feature (1068)..(1068): n is a, c, g, or t
  misc_feature (1077)..(1077): n is a, c, g, or t
  misc_feature (1092)..(1092): n is a, c, g, or t
  misc_feature (1111)..(1111): n is a, c, g, or t
  misc_feature (1116)..(1116): n is a, c, g, or t
  misc_feature (1122)..(1122): n is a, c, g, or t
  misc_feature (1128)..(1128): n is a, c, g, or t
  misc_feature (1130)..(1130): n is a, c, g, or t
  misc_feature (1132)..(1132): n is a, c, g, or t
  misc_feature (1139)..(1139): n is a, c, g, or t
  misc_feature (1143)..(1144): n is a, c, g, or t
  misc_feature (1149)..(1149): n is a, c, g, or t
  misc_feature (1163)..(1163): n is a, c, g, or t
  misc_feature (1206)..(1206): n is a, c, g, or t
  misc_feature (1211)..(1211): n is a, c, g, or t
  misc_feature (1214)..(1214): n is a, c, g, or t
  misc_feature (1220)..(1220): n is a, c, g, or t
  misc_feature (1223)..(1223): n is a, c, g, or t
  misc_feature (1235)..(1235): n is a, c, g, or t
  misc_feature (1249)..(1249): n is a, c, g, or t
  misc_feature (1255)..(1255): n is a, c, g, or t
  misc_feature (1263)..(1263): n is a, c, g, or t
  misc_feature (1265)..(1265): n is a, c, g, or t
  misc_feature (1269)..(1269): n is a, c, g, or t
  misc_feature (1272)..(1272): n is a, c, g, or t
  misc_feature (1276)..(1276): n is a, c, g, or t
  misc_feature (1292)..(1292): n is a, c, g, or t
  misc_feature (1309)..(1310): n is a, c, g, or t
  misc_feature (1312)..(1312): n is a, c, g, or t
  misc_feature (1316)..(1316): n is a, c, g, or t
  misc_feature (1319)..(1319): n is a, c, g, or t
  misc_feature (1325)..(1326): n is a, c, g, or t
  misc_feature (1328)..(1328): n is a, c, g, or t
  misc_feature (1330)..(1330): n is a, c, g, or t
  misc_feature (1339)..(1339): n is a, c, g, or t
  misc_feature (1343)..(1343): n is a, c, g, or t
  misc_feature (1348)..(1348): n is a, c, g, or t
  misc_feature (1352)..(1352): n is a, c, g, or t
  misc_feature (1357)..(1358): n is a, c, g, or t
  misc_feature (1360)..(1360): n is a, c, g, or t
  misc_feature (1364)..(1364): n is a, c, g, or t
  misc_feature (1372)..(1373): n is a, c, g, or t
  misc_feature (1377)..(1380): n is a, c, g, or t
  misc_feature (1388)..(1389): n is a, c, g, or t
tagagaaattaactatgaagaggatcgcatcaccatcaccatcacggatcctatttaggtgacactatagaatcgtcgacccacgcgtccgctagaaatggaggacaggcctcatcgtctcctaattatgaaggacccttacactctttgcaaagccgaattgaagatcgtttagaaagactggatgatgctattcatgttctccggaaccatgcagtgggcccatccacagctatgcctggtggtcatggggacatgcatggaatcattggaccttctcataatggagccatgggtggtctgggctcagggtatggaaccggccttctttcagccaacagacattcactcatggtggggacccatcgtgaagatggcgtggccctgagaggcagccattctcttctgccaaaccaggttccggttccacagcttcctgtccagtctgcgacttcccctgacctgaacccaccccaggacccttacagaggcatgccaccaggactacaggggcagagtgtctcctctggcagctctgagatcaaatccgatgacgagggtgatgagaacctgcaagacacgaaatcttcggaggacaagaaattagatgacgacaagaaggatatcaaatcaattactaggtcaagatctagcaataatgacgatgaggacctgacaccagagcagaaggcagagcgtgagaaggagcggaggatggccaacaatgcccgagagcgtctgcgggtccgtgacatcaacgaggctttcaaagagctcggccgcatggtgcagctccacctcaagagtgacaagccccagaccaagctcctgatcctccaccaggcggtggccgtcatcctcagtctggagcancaagtccgagaaaggaatctgaatccgaaagctgcgtgtctgaaaanaaaggangaaaanaangtgtcctcaaagcctccccctctctcctnggccggcccacaccctggaatgggananccatcgantcncatggganaaagtaaaagggtcnagttgcccattgctncntaaaaaaananaccncttcttaanaactgtatnatcttaaacccaaanaaacctttcctaaaccccnttttngtaaanaaaaanantntgaaaantttnnaatcncaaacccaaagttnccccttccccttttcaaaacgaaacaaaaaaaaaaaaaggggngcccnccnaagggngcnataacttatacnaacttgacccgggnaaaccnaaaacccnancccnggntttnaaaccggggcccgggnttttttgggaaaccccnntngganttnggccgnncnanggaaaaacnggtnccccntatnccggnncnaaanttggtttnntttnnnntaaaaccnnttaatttttaa

SEQ ID NO: 377 - DNA, 1397 bp, Homo Sapiens
  misc_feature (1)..(1): n is a, c, g, or t
  misc_feature (892)..(892): n is a, c, g, or t
  misc_feature (903)..(903): n is a, c, g, or t
  misc_feature (915)..(915): n is a, c, g, or t
  misc_feature (922)..(922): n is a, c, g, or t
  misc_feature (964)..(964): n is a, c, g, or t
  misc_feature (979)..(979): n is a, c, g, or t
  misc_feature (986)..(986): n is a, c, g, or t
  misc_feature (1004)..(1004): n is a, c, g, or t
  misc_feature (1006)..(1006): n is a, c, g, or t
  misc_feature (1022)..(1022): n is a, c, g, or t
  misc_feature (1024)..(1024): n is a, c, g, or t
  misc_feature (1026)..(1027): n is a, c, g, or t
  misc_feature (1029)..(1030): n is a, c, g, or t
  misc_feature (1035)..(1066): n is a, c, g, or t
  misc_feature (1068)..(1068): n is a, c, g, or t
  misc_feature (1070)..(1081): n is a, c, g, or t
  misc_feature (1083)..(1109): n is a, c, g, or t
  misc_feature (1117)..(1117): n is a, c, g, or t
  misc_feature (1121)..(1122): n is a, c, g, or t
  misc_feature (1124)..(1124): n is a, c, g, or t
  misc_feature (1126)..(1130): n is a, c, g, or t
  misc_feature (1136)..(1138): n is a, c, g, or t
  misc_feature (1141)..(1141): n is a, c, g, or t
  misc_feature (1143)..(1145): n is a, c, g, or t
  misc_feature (1150)..(1152): n is a, c, g, or t
  misc_feature (1157)..(1157): n is a, c, g, or t
  misc_feature (1159)..(1159): n is a, c, g, or t
  misc_feature (1161)..(1161): n is a, c, g, or t
  misc_feature (1166)..(1166): n is a, c, g, or t
  misc_feature (1173)..(1173): n is a, c, g, or t
  misc_feature (1177)..(1180): n is a, c, g, or t
  misc_feature (1183)..(1185): n is a, c, g, or t
  misc_feature (1189)..(1189): n is a, c, g, or t
  misc_feature (1191)..(1194): n is a, c, g, or t
  misc_feature (1196)..(1197): n is a, c, g, or t
  misc_feature (1200)..(1200): n is a, c, g, or t
  misc_feature (1202)..(1204): n is a, c, g, or t
  misc_feature (1210)..(1212): n is a, c, g, or t
  misc_feature (1216)..(1216): n is a, c, g, or t
  misc_feature (1219)..(1220): n is a, c, g, or t
  misc_feature (1223)..(1228): n is a, c, g, or t
  misc_feature (1231)..(1235): n is a, c, g, or t
  misc_feature (1237)..(1242): n is a, c, g, or t
  misc_feature (1246)..(1246): n is a, c, g, or t
  misc_feature (1249)..(1249): n is a, c, g, or t
  misc_feature (1251)..(1251): n is a, c, g, or t
  misc_feature (1257)..(1257): n is a, c, g, or t
  misc_feature (1259)..(1260): n is a, c, g, or t
  misc_feature (1263)..(1265): n is a, c, g, or t
  misc_feature (1268)..(1268): n is a, c, g, or t
  misc_feature (1272)..(1272): n is a, c, g, or t
  misc_feature (1274)..(1275): n is a, c, g, or t
  misc_feature (1277)..(1280): n is a, c, g, or t
  misc_feature (1285)..(1285): n is a, c, g, or t
  misc_feature (1288)..(1291): n is a, c, g, or t
  misc_feature (1293)..(1294): n is a, c, g, or t
  misc_feature (1297)..(1297): n is a, c, g, or t
  misc_feature (1300)..(1301): n is a, c, g, or t
  misc_feature (1303)..(1306): n is a, c, g, or t
  misc_feature (1308)..(1309): n is a, c, g, or t
  misc_feature (1311)..(1315): n is a, c, g, or t
  misc_feature (1319)..(1320): n is a, c, g, or t
  misc_feature (1324)..(1324): n is a, c, g, or t
  misc_feature (1331)..(1331): n is a, c, g, or t
  misc_feature (1335)..(1336): n is a, c, g, or t
  misc_feature (1339)..(1339): n is a, c, g, or t
  misc_feature (1341)..(1341): n is a, c, g, or t
  misc_feature (1348)..(1350): n is a, c, g, or t
  misc_feature (1353)..(1354): n is a, c, g, or t
  misc_feature (1357)..(1361): n is a, c, g, or t
  misc_feature (1364)..(1365): n is a, c, g, or t
  misc_feature (1367)..(1367): n is a, c, g, or t
  misc_feature (1369)..(1370): n is a, c, g, or t
  misc_feature (1374)..(1378): n is a, c, g, or t
  misc_feature (1380)..(1382): n is a, c, g, or t
  misc_feature (1385)..(1385): n is a, c, g, or t
  misc_feature (1390)..(1390): n is a, c, g, or t
  misc_feature (1392)..(1392): n is a, c, g, or t
  misc_feature (1394)..(1395): n is a, c, g, or t
natagagaaattactatgagaggatcgcatcaccatcaccatcacggatcctatttaggtgacactatagaatcgtcgacccacgcgtccgggccgctgtacatgagcaccaagaacaccatactgaaagcctacgatgggcgtttcaaggacatcttccaggagatctttgacaagcactataagaccgacttcgacaagaataagatctggtatgagcaccggctcattgatgacatggtggctcaggtcctcaagtcttcgggtggctttgtgtgggcctgcaagaactatgacggagatgtgcagtcagacatcctggcccagggctttggctcccttggcctgatgacgtccgtcctggtctgccctgatgggaagacgattgaggctgaggccgctcatgggaccgtcacccgccactatcgggagcaccagaagggccggcccaccagcaccaaccccatcgccagcatctttgcctggacacgtggcctggagcaccgggggaagctggatgggaaccaagacctcatcaggtttgcccagatgctggagaaggtgtgcgtggagacggtggagagtggagccatgaccaaggacctggcgggctgcattcacggcctcagcaatgtgaagctgaacgagcacttcctgaacaccacggacttcctcgacaccatcaagagcaacctggacagagccctgggcaggcagtagggggaggcgccacccatggctgcagtggaggggccagggctgagccggccggtcctcctgagcgcggcagaaggtgagcctcacagcccctctctggaggcctttctaggggatgtttttttataaaccaaatgttttaaaaagcatatgtgtgtttcccctcatggtgacntgaggcaggancagtgcgttttnacctcanccagtcagtatgtttttgcatactggaaatttatattgcccnttggaacacatgggngccatantttagctactaaaaagcncnttccccaaaaaaaaananannannaaaannnnnnnnnnnnnnnnnnnnnnnnnnnnnnnnanannnnnnnnnnnnannnnnnnnnnnnnnnnnnnnnnnnnnncccccctnaaanncnannnnntatatnnnaantnnncctcnnnaaaancncntaacncccaaantccnnnnttnnntaanannnnannccngnnntttttnnntaanaannatnnnnnnttnnnnntnnnnnnaaantananaaaaancnnttnnnccnattntnngnnnnaaaanttnnnntnntanttnngnnnncnnannnnnaaannttanaaaaaanaaannttncntttcttnnnccnnaannnnnaannanannatgnnnnnannnccncacantncnnaa

SEQ ID NO: 378 - DNA, 1373 bp, Homo Sapiens
  misc_feature (812)..(812): n is a, c, g, or t
  misc_feature (860)..(860): n is a, c, g, or t
  misc_feature (916)..(916): n is a, c, g, or t
  misc_feature (951)..(951): n is a, c, g, or t
  misc_feature (957)..(957): n is a, c, g, or t
  misc_feature (983)..(983): n is a, c, g, or t
  misc_feature (992)..(992): n is a, c, g, or t
  misc_feature (1013)..(1013): n is a, c, g, or t
  misc_feature (1022)..(1022): n is a, c, g, or t
  misc_feature (1031)..(1031): n is a, c, g, or t
  misc_feature (1036)..(1036): n is a, c, g, or t
  misc_feature (1045)..(1045): n is a, c, g, or t
  misc_feature (1047)..(1047): n is a, c, g, or t
  misc_feature (1051)..(1051): n is a, c, g, or t
  misc_feature (1057)..(1057): n is a, c, g, or t
  misc_feature (1060)..(1060): n is a, c, g, or t
  misc_feature (1069)..(1069): n is a, c, g, or t
  misc_feature (1075)..(1075): n is a, c, g, or t
  misc_feature (1077)..(1077): n is a, c, g, or t
  misc_feature (1081)..(1082): n is a, c, g, or t
  misc_feature (1099)..(1099): n is a, c, g, or t
  misc_feature (1101)..(1101): n is a, c, g, or t
  misc_feature (1107)..(1107): n is a, c, g, or t
  misc_feature (1110)..(1110): n is a, c, g, or t
  misc_feature (1112)..(1112): n is a, c, g, or t
  misc_feature (1120)..(1120): n is a, c, g, or t
  misc_feature (1124)..(1124): n is a, c, g, or t
  misc_feature (1128)..(1128): n is a, c, g, or t
  misc_feature (1145)..(1145): n is a, c, g, or t
  misc_feature (1147)..(1148): n is a, c, g, or t
  misc_feature (1151)..(1151): n is a, c, g, or t
  misc_feature (1154)..(1154): n is a, c, g, or t
  misc_feature (1156)..(1157): n is a, c, g, or t
  misc_feature (1160)..(1160): n is a, c, g, or t
  misc_feature (1162)..(1162): n is a, c, g, or t
  misc_feature (1169)..(1169): n is a, c, g, or t
  misc_feature (1186)..(1186): n is a, c, g, or t
  misc_feature (1196)..(1196): n is a, c, g, or t
  misc_feature (1198)..(1199): n is a, c, g, or t
  misc_feature (1202)..(1202): n is a, c, g, or t
  misc_feature (1206)..(1206): n is a, c, g, or t
  misc_feature (1216)..(1216): n is a, c, g, or t
  misc_feature (1220)..(1221): n is a, c, g, or t
  misc_feature (1225)..(1225): n is a, c, g, or t
  misc_feature (1238)..(1238): n is a, c, g, or t
  misc_feature (1243)..(1245): n is a, c, g, or t
  misc_feature (1249)..(1249): n is a, c, g, or t
  misc_feature (1253)..(1255): n is a, c, g, or t
  misc_feature (1258)..(1258): n is a, c, g, or t
  misc_feature (1266)..(1266): n is a, c, g, or t
  misc_feature (1270)..(1270): n is a, c, g, or t
  misc_feature (1281)..(1281): n is a, c, g, or t
  misc_feature (1283)..(1283): n is a, c, g, or t
  misc_feature (1300)..(1300): n is a, c, g, or t
  misc_feature (1304)..(1308): n is a, c, g, or t
  misc_feature (1312)..(1315): n is a, c, g, or t
  misc_feature (1320)..(1320): n is a, c, g, or t
  misc_feature (1324)..(1324): n is a, c, g, or t
  misc_feature (1329)..(1329): n is a, c, g, or t
  misc_feature (1338)..(1345): n is a, c, g, or t
  misc_feature (1348)..(1348): n is a, c, g, or t
  misc_feature (1351)..(1354): n is a, c, g, or t
  misc_feature (1360)..(1361): n is a, c, g, or t
  misc_feature (1364)..(1366): n is a, c, g, or t
  misc_feature (1368)..(1369): n is a, c, g, or t
  misc_feature (1372)..(1373): n is a, c, g, or t
aatagagaaattactatgagaggatcgcatcaccatcaccatcacggatcctatttaggtgacactatagaatcgtcgacccacgcgtccgctctactctgcgctctctgcccgcgccgccgccgcctcagcctcggccctgcgctgcgcgcccggcccgtgctgccatggcctgccgcccgcgaagcccgccgaggcatcagagccgctgcgacggtgacgccagcccgccgtcccccgcgcgatggagcctgggacggaagcgcagagccgacggcaggcgctggaggcccgaagacgccgaggaggcagagcaccgcggcgccgagcgcagacccgagagatataaaaggaaactcctcatcaatgactttggaagagagagaaaatcatcatcaggaagttctgattcaaaggagtctatgtctactgtgccggctgactttgagacagatgaaagtgtcctaatgaggagacagaagcagatcaactatgggaagaacacaattgcctatgatcgttatattaaagaagtcccaagacaccttcgacaacctggcattcatcccaagacccctaataaatttaagaagtatagtcgacgttcatgggaccagcaaatcaaactctggaaggtggctctgcatttttgggatcctccagcggaagaaggatgtgatttgcaagaaatgatgtgtactctggcacacccaccaaggtgagacacatggacagtcaagtggaggatgagtttgatttggaagcttgtttaactgaacccttgagagacttctcagccatgagctaactgnccccctggcggccaggaaaagaaacagctcctcccgactaggtggaangctggccaggcaccaagcatgtgtgtgcacttgtacctggtggtttctctgtttancagtccattagctcatgctgaattatttttgcctnactttncttaaaaacattaaatttttatgtanagggagtanatttttgcatgttttaaattnttaaatggnagcttaatnccaanaaaagttantngaancttttnttncccgcgagncttaantngcgnnaacccctgtttgtcccncnagggtnaancntgaaaccntctnacanaactgggttttcccaangnnatnttncnnttntngctttgncagggggaactgttttngaatttaccntnnaancccntggggaccanttgnnaagnccccttttttttnggccnnnaatntttnnnaancccttttnattntttttggaaantnatttttggcctttttcnaatnnnnnaaannnnttttnaaancaaanttttaattnnnnnnnnaanaannnntttttnnaannntnnggnn

SEQ ID NO: 379 - DNA, 1463 bp, Homo Sapiens
  misc_feature (823)..(823): n is a, c, g, or t
  misc_feature (871)..(871): n is a, c, g, or t
  misc_feature (912)..(912): n is a, c, g, or t
  misc_feature (928)..(928): n is a, c, g, or t
  misc_feature (948)..(948): n is a, c, g, or t
  misc_feature (952)..(952): n is a, c, g, or t
  misc_feature (955)..(955): n is a, c, g, or t
  misc_feature (957)..(957): n is a, c, g, or t
  misc_feature (962)..(962): n is a, c, g, or t
  misc_feature (966)..(966): n is a, c, g, or t
  misc_feature (974)..(974): n is a, c, g, or t
  misc_feature (982)..(982): n is a, c, g, or t
  misc_feature (996)..(996): n is a, c, g, or t
  misc_feature (999)..(999): n is a, c, g, or t
  misc_feature (1011)..(1011): n is a, c, g, or t
  misc_feature (1027)..(1027): n is a, c, g, or t
  misc_feature (1030)..(1030): n is a, c, g, or t
  misc_feature (1033)..(1033): n is a, c, g, or t
  misc_feature (1039)..(1039): n is a, c, g, or t
  misc_feature (1043)..(1043): n is a, c, g, or t
  misc_feature (1058)..(1059): n is a, c, g, or t
  misc_feature (1062)..(1062): n is a, c, g, or t
  misc_feature (1064)..(1064): n is a, c, g, or t
  misc_feature (1070)..(1071): n is a, c, g, or t
  misc_feature (1084)..(1084): n is a, c, g, or t
  misc_feature (1089)..(1090): n is a, c, g, or t
  misc_feature (1098)..(1098): n is a, c, g, or t
  misc_feature (1101)..(1101): n is a, c, g, or t
  misc_feature (1105)..(1105): n is a, c, g, or t
  misc_feature (1111)..(1111): n is a, c, g, or t
  misc_feature (1122)..(1124): n is a, c, g, or t
  misc_feature (1127)..(1127): n is a, c, g, or t
  misc_feature (1130)..(1130): n is a, c, g, or t
  misc_feature (1137)..(1138): n is a, c, g, or t
  misc_feature (1145)..(1145): n is a, c, g, or t
  misc_feature (1148)..(1148): n is a, c, g, or t
  misc_feature (1152)..(1152): n is a, c, g, or t
  misc_feature (1155)..(1155): n is a, c, g, or t
  misc_feature (1160)..(1160): n is a, c, g, or t
  misc_feature (1163)..(1163): n is a, c, g, or t
  misc_feature (1167)..(1167): n is a, c, g, or t
  misc_feature (1169)..(1169): n is a, c, g, or t
  misc_feature (1174)..(1174): n is a, c, g, or t
  misc_feature (1182)..(1182): n is a, c, g, or t
  misc_feature (1184)..(1184): n is a, c, g, or t
  misc_feature (1187)..(1187): n is a, c, g, or t
  misc_feature (1195)..(1195): n is a, c, g, or t
  misc_feature (1202)..(1202): n is a, c, g, or t
  misc_feature (1206)..(1206): n is a, c, g, or t
  misc_feature (1212)..(1212): n is a, c, g, or t
  misc_feature (1214)..(1214): n is a, c, g, or t
  misc_feature (1225)..(1225): n is a, c, g, or t
  misc_feature (1234)..(1234): n is a, c, g, or t
  misc_feature (1237)..(1237): n is a, c, g, or t
  misc_feature (1248)..(1248): n is a, c, g, or t
  misc_feature (1251)..(1251): n is a, c, g, or t
  misc_feature (1262)..(1263): n is a, c, g, or t
  misc_feature (1274)..(1274): n is a, c, g, or t
  misc_feature (1276)..(1276): n is a, c, g, or t
  misc_feature (1289)..(1289): n is a, c, g, or t
  misc_feature (1294)..(1294): n is a, c, g, or t
  misc_feature (1300)..(1300): n is a, c, g, or t
  misc_feature (1304)..(1304): n is a, c, g, or t
  misc_feature (1316)..(1316): n is a, c, g, or t
  misc_feature (1340)..(1340): n is a, c, g, or t
  misc_feature (1343)..(1343): n is a, c, g, or t
  misc_feature (1346)..(1346): n is a, c, g, or t
  misc_feature (1350)..(1350): n is a, c, g, or t
  misc_feature (1355)..(1355): n is a, c, g, or t
  misc_feature (1359)..(1361): n is a, c, g, or t
  misc_feature (1371)..(1371): n is a, c, g, or t
  misc_feature (1392)..(1393): n is a, c, g, or t
  misc_feature (1398)..(1398): n is a, c, g, or t
  misc_feature (1400)..(1400): n is a, c, g, or t
  misc_feature (1407)..(1407): n is a, c, g, or t
  misc_feature (1409)..(1409): n is a, c, g, or t
  misc_feature (1411)..(1411): n is a, c, g, or t
  misc_feature (1414)..(1414): n is a, c, g, or t
  misc_feature (1427)..(1429): n is a, c, g, or t
  misc_feature (1437)..(1437): n is a, c, g, or t
  misc_feature (1444)..(1445): n is a, c, g, or t
  misc_feature (1451)..(1451): n is a, c, g, or t
aaagagaaattactatgagaggatcgcatcaccatcaccatcacggatcctatttaggtgacactatagaatcgtcgacccacgcgtccgcccacgcgtccggatgtagttttctctgcgcgtgtgcgttttccctcctcccccgccctcagggtccacggccaccatggcgtattaggggcagcagtgcctgcggcagcattggcctttgcagcggcggcagcagcaccaggctctgcagcggcaacccccagcggcttaagccatggcgcttctcacggcattcagcagcagcgttgctgtaaccgacaaagacaccttcgaattaagcacattcctcgattccagcaaagcaccgcaacatgaccgaaatgagcttcctgagcagcgaggtgttggtgggggacttgatgtcccccttcgacccgtcgggtttgggggctgaagaaagcctaggtctcttagatgattacctggaggtggccaagcacttcaaacctcatgggttctccagcgacaaggctaaggcgggctcctccgaatggctggctgtggatgggttggtcagtccctccaacaacagcaaggaggatgccttctccgggacagattggatgttggagaaaatggatttgaaggagttcgacttggatgccctgttgggtatagatgacctggaaaccatgccagatgaccttctgaccacgttggatgacacttgtgatctctttgcccccctagtccaggagactaataagcagcccccccagacggtgaacccaattggccatctcccaaaaaagttttaacaaaacccgaccanggttgcccccttcacctttcttacaacctcttcccccttttccccagngggtccctgtccttccacttccaaaaatcatttccttttanttttaaaagctgggcnaagtgaagttggaaaatcanctgnaangnaaaanaggnaagcccanaactacanctgcttaacgttgncantgaatccccccnagtgcataaaaggaanaanaanaccccnttcnaaaaaaatgaaaagnnggnantctggnnaaaccccaaaaantcctnntctggggntcncctncaaganaaacccccttnnnacnaanggtcttnncaaaaanaanaaanccnccccnctnccangnggttncctggggngnttncccccttnccaaaancttncaaaancnccttggaaaanaaaaatggntanccccaaaaatnaanggggaaaaaanntgataaaaaantntaaaaaaaagtgnaaaanaaaaantccnccctcaagttcnccccaaaaaaaaaaaggggaaaanagnagncttntttcngggnnntcaaaaatcnaaaaaaaaaaaaagatcctannaaaangnggaatcncntnccnaaaaactcccccnnnaaataatnaaaaaannccccangaaggggaaaaa

SEQ ID NO: 380 - DNA, 1380 bp, Homo Sapiens
  misc_feature (2)..(3): n is a, c, g, or t
  misc_feature (5)..(7): n is a, c, g, or t
  misc_feature (9)..(9): n is a, c, g, or t
  misc_feature (169)..(169): n is a, c, g, or t
  misc_feature (188)..(188): n is a, c, g, or t
  misc_feature (202)..(202): n is a, c, g, or t
  misc_feature (331)..(331): n is a, c, g, or t
  misc_feature (470)..(470): n is a, c, g, or t
  misc_feature (475)..(475): n is a, c, g, or t
  misc_feature (477)..(477): n is a, c, g, or t
  misc_feature (516)..(516): n is a, c, g, or t
  misc_feature (551)..(551): n is a, c, g, or t
  misc_feature (593)..(593): n is a, c, g, or t
  misc_feature (670)..(670): n is a, c, g, or t
  misc_feature (687)..(687): n is a, c, g, or t
  misc_feature (694)..(694): n is a, c, g, or t
  misc_feature (714)..(714): n is a, c, g, or t
  misc_feature (737)..(737): n is a, c, g, or t
  misc_feature (740)..(740): n is a, c, g, or t
  misc_feature (745)..(745): n is a, c, g, or t
  misc_feature (756)..(756): n is a, c, g, or t
  misc_feature (761)..(761): n is a, c, g, or t
  misc_feature (785)..(786): n is a, c, g, or t
  misc_feature (802)..(804): n is a, c, g, or t
  misc_feature (806)..(806): n is a, c, g, or t
  misc_feature (808)..(808): n is a, c, g, or t
  misc_feature (812)..(812): n is a, c, g, or t
  misc_feature (820)..(821): n is a, c, g, or t
  misc_feature (828)..(828): n is a, c, g, or t
  misc_feature (833)..(833): n is a, c, g, or t
  misc_feature (835)..(835): n is a, c, g, or t
  misc_feature (847)..(847): n is a, c, g, or t
  misc_feature (851)..(851): n is a, c, g, or t
  misc_feature (859)..(859): n is a, c, g, or t
  misc_feature (861)..(861): n is a, c, g, or t
  misc_feature (870)..(870): n is a, c, g, or t
  misc_feature (877)..(877): n is a, c, g, or t
  misc_feature (887)..(887): n is a, c, g, or t
  misc_feature (895)..(895): n is a, c, g, or t
  misc_feature (902)..(902): n is a, c, g, or t
  misc_feature (905)..(905): n is a, c, g, or t
  misc_feature (907)..(908): n is a, c, g, or t
  misc_feature (923)..(923): n is a, c, g, or t
  misc_feature (926)..(926): n is a, c, g, or t
  misc_feature (933)..(933): n is a, c, g, or t
  misc_feature (943)..(943): n is a, c, g, or t
  misc_feature (948)..(948): n is a, c, g, or t
  misc_feature (951)..(951): n is a, c, g, or t
  misc_feature (956)..(956): n is a, c, g, or t
  misc_feature (959)..(959): n is a, c, g, or t
  misc_feature (964)..(964): n is a, c, g, or t
  misc_feature (966)..(966): n is a, c, g, or t
  misc_feature (969)..(969): n is a, c, g, or t
  misc_feature (972)..(972): n is a, c, g, or t
  misc_feature (975)..(975): n is a, c, g, or t
  misc_feature (978)..(978): n is a, c, g, or t
  misc_feature (986)..(986): n is a, c, g, or t
  misc_feature (991)..(991): n is a, c, g, or t
  misc_feature (995)..(995): n is a, c, g, or t
  misc_feature (1000)..(1000): n is a, c, g, or t
  misc_feature (1002)..(1002): n is a, c, g, or t
  misc_feature (1004)..(1004): n is a, c, g, or t
  misc_feature (1007)..(1007): n is a, c, g, or t
  misc_feature (1009)..(1009): n is a, c, g, or t
  misc_feature (1013)..(1013): n is a, c, g, or t
  misc_feature (1015)..(1016): n is a, c, g, or t
  misc_feature (1020)..(1020): n is a, c, g, or t
  misc_feature (1024)..(1024): n is a, c, g, or t
  misc_feature (1040)..(1042): n is a, c, g, or t
  misc_feature (1048)..(1048): n is a, c, g, or t
  misc_feature (1055)..(1056): n is a, c, g, or t
  misc_feature (1059)..(1059): n is a, c, g, or t
  misc_feature (1062)..(1064): n is a, c, g, or t
  misc_feature (1085)..(1086): n is a, c, g, or t
  misc_feature (1089)..(1089): n is a, c, g, or t
  misc_feature (1091)..(1091): n is a, c, g, or t
  misc_feature (1097)..(1097): n is a, c, g, or t
  misc_feature (1099)..(1099): n is a, c, g, or t
  misc_feature (1102)..(1103): n is a, c, g, or t
  misc_feature (1106)..(1106): n is a, c, g, or t
  misc_feature (1108)..(1110): n is a, c, g, or t
  misc_feature (1112)..(1112): n is a, c, g, or t
  misc_feature (1119)..(1119): n is a, c, g, or t
  misc_feature (1122)..(1122): n is a, c, g, or t
  misc_feature (1126)..(1126): n is a, c, g, or t
  misc_feature (1137)..(1137): n is a, c, g, or t
  misc_feature (1142)..(1142): n is a, c, g, or t
  misc_feature (1154)..(1154): n is a, c, g, or t
  misc_feature (1159)..(1159): n is a, c, g, or t
  misc_feature (1161)..(1163): n is a, c, g, or t
  misc_feature (1166)..(1166): n is a, c, g, or t
  misc_feature (1168)..(1168): n is a, c, g, or t
  misc_feature (1174)..(1179): n is a, c, g, or t
  misc_feature (1188)..(1191): n is a, c, g, or t
  misc_feature (1197)..(1197): n is a, c, g, or t
  misc_feature (1214)..(1215): n is a, c, g, or t
  misc_feature (1218)..(1218): n is a, c, g, or t
  misc_feature (1221)..(1221): n is a, c, g, or t
  misc_feature (1232)..(1233): n is a, c, g, or t
  misc_feature (1238)..(1238): n is a, c, g, or t
  misc_feature (1247)..(1247): n is a, c, g, or t
  misc_feature (1249)..(1249): n is a, c, g, or t
  misc_feature (1256)..(1258): n is a, c, g, or t
  misc_feature (1261)..(1263): n is a, c, g, or t
  misc_feature (1272)..(1272): n is a, c, g, or t
  misc_feature (1277)..(1278): n is a, c, g, or t
  misc_feature (1280)..(1280): n is a, c, g, or t
  misc_feature (1282)..(1282): n is a, c, g, or t
  misc_feature (1290)..(1290): n is a, c, g, or t
  misc_feature (1293)..(1294): n is a, c, g, or t
  misc_feature (1300)..(1300): n is a, c, g, or t
  misc_feature (1304)..(1304): n is a, c, g, or t
  misc_feature (1307)..(1308): n is a, c, g, or t
  misc_feature (1316)..(1316): n is a, c, g, or t
  misc_feature (1319)..(1320): n is a, c, g, or t
  misc_feature (1323)..(1323): n is a, c, g, or t
  misc_feature (1330)..(1331): n is a, c, g, or t
  misc_feature (1336)..(1337): n is a, c, g, or t
  misc_feature (1340)..(1340): n is a, c, g, or t
  misc_feature (1346)..(1346): n is a, c, g, or t
  misc_feature (1351)..(1351): n is a, c, g, or t
  misc_feature (1358)..(1360): n is a, c, g, or t
  misc_feature (1365)..(1365): n is a, c, g, or t
  misc_feature (1369)..(1369): n is a, c, g, or t
  misc_feature (1379)..(1380): n is a, c, g, or t
annannntnaaagatattactatgagaggatcgcatcaccatcaccatcacggatcctatttaggtgacactatagaatcgtcgacccacgcgtccgccgccaggcggctcatcgagtccaggagtgcatcccctgacagtaggaaggtggtcaaatggaatgtggaanacacctttagctggcttcngaaggaccactcancctccaaggaggactacatggatcgcctggagcatctgcggaggcagtgtggcccccacgtctcggccgcagccaaggactccgtggaaggcatctgcagtaagatctaccacatctccctggagtacntcaaacggatccgagagaagcaccttgccatcctcaaggaaaacaacatctcaaaggaggtggaggcccctgaggtggagccccgcctagtgtactgctacccagtccggctggctgtgtctgcaccgcccatgcccancgtgnanatgcacatggagaacaacgtggtctgcatccggtataanggagagatggtcaaggtcagccgcaactacttcancaagctgtggctcctttaccgctacagctgcattgatgactntgcctttgagaggttcctgccccgggtctggtgtcttctccgaccgtaccagatgatgttcggcgtgggcctctacnaagggactggcctgcanggatcgntgcctgtgcatgtctttgangccctccaccgactctttggcgncancttcnagtgcttcgtntcacnccctcaactgctacttccgcccannactgttctgcctttcnnngnanaaanactgctanntttggcnccccncngggaacctgccnaaantttgcctncnactgaagtngtttcantttgaggccnaaaccctnccctttnttncnnaggaagctccatggnatngccatgntcctcctcanttttnaanaaacntgnctttnanaanctnacnggnaacccctngttcntttnaatcntngnttnancccnannaatnggtnggaaaatcccctcaannncaattncttttannccnaannngaatcaaaacccctttcaaannccnancaattnantcnngcntnnncnttttaanaanatanacacctctaantgatntcccaaccaatnttttnannnaangnaaaatnnnnnntttcagggnnnnttcccnaaaaagggttattcttnnttnatnacaaaaaaaannctttntttttaccnantgggacnnncannntccttatanccatnntngnaaattaanaanntttatncaancgnntatttatngcnnaanacacaannattcnnggntttttnctcanaacaatnnnatctnaganaatcatatann

SEQ ID NO: 381 - DNA, 1306 bp, Homo Sapiens
  misc_feature (878)..(878): n is a, c, g, or t
  misc_feature (909)..(909): n is a, c, g, or t
  misc_feature (919)..(919): n is a, c, g, or t
  misc_feature (947)..(947): n is a, c, g, or t
  misc_feature (965)..(965): n is a, c, g, or t
  misc_feature (968)..(968): n is a, c, g, or t
  misc_feature (976)..(976): n is a, c, g, or t
  misc_feature (980)..(980): n is a, c, g, or t
  misc_feature (1008)..(1008): n is a, c, g, or t
  misc_feature (1027)..(1027): n is a, c, g, or t
  misc_feature (1031)..(1031): n is a, c, g, or t
  misc_feature (1033)..(1033): n is a, c, g, or t
  misc_feature (1036)..(1036): n is a, c, g, or t
  misc_feature (1038)..(1038): n is a, c, g, or t
  misc_feature (1041)..(1041): n is a, c, g, or t
  misc_feature (1043)..(1043): n is a, c, g, or t
  misc_feature (1046)..(1046): n is a, c, g, or t
  misc_feature (1048)..(1048): n is a, c, g, or t
  misc_feature (1056)..(1056): n is a, c, g, or t
  misc_feature (1061)..(1061): n is a, c, g, or t
  misc_feature (1064)..(1064): n is a, c, g, or t
  misc_feature (1066)..(1066): n is a, c, g, or t
  misc_feature (1090)..(1090): n is a, c, g, or t
  misc_feature (1102)..(1102): n is a, c, g, or t
  misc_feature (1110)..(1110): n is a, c, g, or t
  misc_feature (1115)..(1115): n is a, c, g, or t
  misc_feature (1117)..(1117): n is a, c, g, or t
  misc_feature (1123)..(1123): n is a, c, g, or t
  misc_feature (1127)..(1127): n is a, c, g, or t
  misc_feature (1132)..(1132): n is a, c, g, or t
  misc_feature (1134)..(1134): n is a, c, g, or t
  misc_feature (1153)..(1153): n is a, c, g, or t
  misc_feature (1160)..(1160): n is a, c, g, or t
  misc_feature (1162)..(1162): n is a, c, g, or t
  misc_feature (1166)..(1166): n is a, c, g, or t
  misc_feature (1173)..(1173): n is a, c, g, or t
  misc_feature (1184)..(1184): n is a, c, g, or t
  misc_feature (1193)..(1193): n is a, c, g, or t
  misc_feature (1196)..(1196): n is a, c, g, or t
  misc_feature (1198)..(1198): n is a, c, g, or t
  misc_feature (1211)..(1212): n is a, c, g, or t
  misc_feature (1214)..(1214): n is a, c, g, or t
  misc_feature (1218)..(1218): n is a, c, g, or t
  misc_feature (1223)..(1223): n is a, c, g, or t
  misc_feature (1233)..(1233): n is a, c, g, or t
  misc_feature (1240)..(1240): n is a, c, g, or t
  misc_feature (1253)..(1253): n is a, c, g, or t
  misc_feature (1260)..(1260): n is a, c, g, or t
  misc_feature (1272)..(1272): n is a, c, g, or t
  misc_feature (1285)..(1285): n is a, c, g, or t
  misc_feature (1287)..(1287): n is a, c, g, or t
  misc_feature (1295)..(1295): n is a, c, g, or t
  misc_feature (1299)..(1299): n is a, c, g, or t
agagaaattactatggagaggatcgcatcaccatcaccatcacggatcctatttaggtgacactatagaatcgtcgacccacgcgtccgacatcttctttgaagtaagttatacaggcacaattttaatctttaagaaatctggtgggcttttaataccaagtgagttccatagtggcatatttaactcttaaaacatttgctagagtagataccttttctagagtagattgaggaaatggaatgtatgtcaaaaatagcttagttgggtaaaattactgctatataatataaaaactgattttcaaatcataaaattgctactatatgtgggatcttttgtgatataactctaattgcatggctaattaaaaagagaatatatgtgatattttaacagagacgtgattggcagcagatggctgattaaggaggaactagaagaaatgttagtggaaaaactgtcagatctagattatatgcagttcattcggctgctagaaaagttattgacatcgcagtgtggtgctgctgaggaagaatttgtgcagaggtttcgaagaagtgtaactcttgaatcaaaaaaacagctgattgaacctgtacagtatgatgagcaaggaatggcctttagcaaaagcgaaggtaaaagaaagactgcaaaagcagaagcaattgtttataaacatggaagtggaagaataaaagtaaatggaattgattaccagctttacttcccgatcacacaggacagagaacagctgatgttccctttccactttgttgaccggctgggaaagcacgacgtgacctgcacagtctcagggggcgggaggtcggcgcaggctggagcaatacgactggcaatggcaaaagccntgtgcagcttttgtcaccgaggacgaggtcnagtggatganacaagctggactacttactactgatccncgtgtgagggaacggaanaancccggccnaaangggaccccccaaaaagtttacgtggaanaaacccctaagggtttgcncccngnaangnaangnaananctattatntgggncgncntggggcaaaccccccgtaaataanggctgacccccntgagggcngtacngnccaaanttcnttgancngggaaagggatttattttnaaggccncntggnaaggggnccctttaaaantaagggganttngnaaaaaaaaaaaannanaaanggggncccccccaanggggccnaaaacctaatacngaccggnccccggggaaancccaaaggccccnancccccggntttnccacccc

SEQ ID NO: 382 - DNA, 1426 bp, Homo Sapiens
  misc_feature (14)..(14): n is a, c, g, or t
  misc_feature (636)..(636): n is a, c, g, or t
  misc_feature (641)..(641): n is a, c, g, or t
  misc_feature (705)..(705): n is a, c, g, or t
  misc_feature (709)..(709): n is a, c, g, or t
  misc_feature (736)..(736): n is a, c, g, or t
  misc_feature (760)..(760): n is a, c, g, or t
  misc_feature (771)..(771): n is a, c, g, or t
  misc_feature (779)..(779): n is a, c, g, or t
  misc_feature (807)..(807): n is a, c, g, or t
  misc_feature (810)..(811): n is a, c, g, or t
  misc_feature (819)..(819): n is a, c, g, or t
  misc_feature (829)..(829): n is a, c, g, or t
  misc_feature (835)..(835): n is a, c, g, or t
  misc_feature (840)..(840): n is a, c, g, or t
  misc_feature (848)..(848): n is a, c, g, or t
  misc_feature (852)..(852): n is a, c, g, or t
  misc_feature (855)..(855): n is a, c, g, or t
  misc_feature (859)..(859): n is a, c, g, or t
  misc_feature (873)..(873): n is a, c, g, or t
  misc_feature (877)..(878): n is a, c, g, or t
  misc_feature (883)..(885): n is a, c, g, or t
  misc_feature (891)..(891): n is a, c, g, or t
  misc_feature (894)..(894): n is a, c, g, or t
  misc_feature (898)..(898): n is a, c, g, or t
  misc_feature (929)..(929): n is a, c, g, or t
  misc_feature (934)..(934): n is a, c, g, or t
  misc_feature (942)..(943): n is a, c, g, or t
  misc_feature (945)..(945): n is a, c, g, or t
  misc_feature (956)..(956): n is a, c, g, or t
  misc_feature (958)..(958): n is a, c, g, or t
  misc_feature (963)..(964): n is a, c, g, or t
  misc_feature (977)..(977): n is a, c, g, or t
  misc_feature (979)..(979): n is a, c, g, or t
  misc_feature (983)..(983): n is a, c, g, or t
  misc_feature (987)..(988): n is a, c, g, or t
  misc_feature (994)..(996): n is a, c, g, or t
  misc_feature (1012)..(1013): n is a, c, g, or t
  misc_feature (1023)..(1023): n is a, c, g, or t
  misc_feature (1033)..(1033): n is a, c, g, or t
  misc_feature (1048)..(1048): n is a, c, g, or t
  misc_feature (1051)..(1052): n is a, c, g, or t
  misc_feature (1058)..(1058): n is a, c, g, or t
  misc_feature (1064)..(1064): n is a, c, g, or t
  misc_feature (1078)..(1079): n is a, c, g, or t
  misc_feature (1084)..(1084): n is a, c, g, or t
  misc_feature (1086)..(1086): n is a, c, g, or t
  misc_feature (1100)..(1100): n is a, c, g, or t
  misc_feature (1106)..(1106): n is a, c, g, or t
  misc_feature (1111)..(1111): n is a, c, g, or t
  misc_feature (1119)..(1119): n is a, c, g, or t
  misc_feature (1125)..(1128): n is a, c, g, or t
  misc_feature (1131)..(1132): n is a, c, g, or t
  misc_feature (1134)..(1134): n is a, c, g, or t
  misc_feature (1142)..(1143): n is a, c, g, or t
  misc_feature (1147)..(1147): n is a, c, g, or t
  misc_feature (1162)..(1162): n is a, c, g, or t
  misc_feature (1167)..(1167): n is a, c, g, or t
  misc_feature (1178)..(1178): n is a, c, g, or t
  misc_feature (1180)..(1181): n is a, c, g, or t
  misc_feature (1184)..(1184): n is a, c, g, or t
  misc_feature (1190)..(1191): n is a, c, g, or t
  misc_feature (1213)..(1214): n is a, c, g, or t
  misc_feature (1222)..(1222): n is a, c, g, or t
  misc_feature (1226)..(1230): n is a, c, g, or t
  misc_feature (1233)..(1234): n is a, c, g, or t
  misc_feature (1241)..(1241): n is a, c, g, or t
  misc_feature (1244)..(1246): n is a, c, g, or t
  misc_feature (1249)..(1252): n is a, c, g, or t
  misc_feature (1255)..(1255): n is a, c, g, or t
  misc_feature (1261)..(1264): n is a, c, g, or t
  misc_feature (1268)..(1268): n is a, c, g, or t
  misc_feature (1270)..(1272): n is a, c, g, or t
  misc_feature (1277)..(1277): n is a, c, g, or t
  misc_feature (1279)..(1280): n is a, c, g, or t
  misc_feature (1282)..(1282): n is a, c, g, or t
  misc_feature (1292)..(1294): n is a, c, g, or t
  misc_feature (1298)..(1298): n is a, c, g, or t
  misc_feature (1300)..(1303): n is a, c, g, or t
  misc_feature (1306)..(1306): n is a, c, g, or t
  misc_feature (1310)..(1311): n is a, c, g, or t
  misc_feature (1315)..(1315): n is a, c, g, or t
  misc_feature (1317)..(1317): n is a, c, g, or t
  misc_feature (1331)..(1333): n is a, c, g, or t
  misc_feature (1347)..(1347): n is a, c, g, or t
  misc_feature (1352)..(1352): n is a, c, g, or t
  misc_feature (1360)..(1360): n is a, c, g, or t
  misc_feature (1364)..(1364): n is a, c, g, or t
  misc_feature (1369)..(1369): n is a, c, g, or t
  misc_feature (1371)..(1371): n is a, c, g, or t
  misc_feature (1374)..(1374): n is a, c, g, or t
  misc_feature (1376)..(1376): n is a, c, g, or t
  misc_feature (1379)..(1379): n is a, c, g, or t
  misc_feature (1385)..(1385): n is a, c, g, or t
  misc_feature (1389)..(1390): n is a, c, g, or t
  misc_feature (1402)..(1402): n is a, c, g, or t
  misc_feature (1418)..(1418): n is a, c, g, or t
tagaggaaattacntatggagaggatcgcatcaccatcaccatcacggatcctatttaggtgacactatagaatcgtcgacccacgcgatccgcccacgcgtccgcggcggcggcggtggcggcggcgactgctgcggtgaaggaggaggaggagccgagcgggcgctggcaccgaggcctgaccatggacgaggaatacgatgtgatcgtgctggggaccggtctcaccgaatgcatcctgtcgggcatcatgtctgtgaacgggaagaaggtgctgcacatggaccggaacccctactacgggggcgagagctcctccatcacacccctggaggagctgtataagcgttttcagttgctggaggggccccctgagtcgatgggccgaggccgagactggaatgttgacctgattcccaaattcctcatggctaacgggcagctggtaaagatgctactgtatacagaggtgactcgctacctggacttcaaggtggtggagggcagctttgtctacaaggggggcaagatctacaaagtgccgtccactgagactgaggccttggcttccaatctgatgggcatgtttgaaaaacggcgcttccgcaagttcctggtgtttgtggcaaacttcnatganaatgaccccaagacctttgagggcgttgacccccaaactaccagcatgcgtgacgtctacccgngaanttttgatctgggcccaggatgtcatcnaatttcacctggccatgcccctgncgcctctaccncactgatnactaccctggaccagccctgccttgaanacnntcaacccncatcaagttntaaaantgaantccccggncccngtnaagncaaaaaccccatanttannccccnnntctacngcnttgngcccaacttgccccaaggtttttgcaaaaanataantcccatcnnanggggggaacananaatcnnaaaacaaaccctngngaantaanntctacnnngaaaaacgccaaagtnngttggccttnaaatcttaangaaaagttgcccccnttnnaaaccntttaanttttggacccccannttatntnccccaaacctatgncgaaanactgncccaattntccccnnnncanncntattcctnntccnccccctcaaaaaacnccaanacccctcctcncnngcnaaaatnncacccccccaaaacactcttannaaaatatnaaannnnncanngtcctanatnnnctnnnnccnaaattnnnncccncnnngtaantnnanatttttcctnnntccncnnnntanaaanncccncncaaaaaaataggtnnnccacccccttcatntacgnccccttanaacnaattntnacnancancttctntaannccctttatatantttctaacaccctctnctttctct

SEQ ID NO: 383 - DNA, 1379 bp, Homo Sapiens
  misc_feature (768)..(768): n is a, c, g, or t
  misc_feature (840)..(840): n is a, c, g, or t
  misc_feature (874)..(874): n is a, c, g, or t
  misc_feature (887)..(887): n is a, c, g, or t
  misc_feature (898)..(898): n is a, c, g, or t
  misc_feature (929)..(929): n is a, c, g, or t
  misc_feature (933)..(933): n is a, c, g, or t
  misc_feature (962)..(962): n is a, c, g, or t
  misc_feature (967)..(967): n is a, c, g, or t
  misc_feature (992)..(992): n is a, c, g, or t
  misc_feature (995)..(995): n is a, c, g, or t
  misc_feature (1002)..(1002): n is a, c, g, or t
  misc_feature (1006)..(1006): n is a, c, g, or t
  misc_feature (1018)..(1018): n is a, c, g, or t
  misc_feature (1022)..(1022): n is a, c, g, or t
  misc_feature (1032)..(1034): n is a, c, g, or t
  misc_feature (1036)..(1036): n is a, c, g, or t
  misc_feature (1038)..(1038): n is a, c, g, or t
  misc_feature (1042)..(1042): n is a, c, g, or t
  misc_feature (1049)..(1049): n is a, c, g, or t
  misc_feature (1054)..(1054): n is a, c, g, or t
  misc_feature (1066)..(1066): n is a, c, g, or t
  misc_feature (1068)..(1068): n is a, c, g, or t
  misc_feature (1070)..(1071): n is a, c, g, or t
  misc_feature (1082)..(1082): n is a, c, g, or t
  misc_feature (1100)..(1101): n is a, c, g, or t
  misc_feature (1104)..(1105): n is a, c, g, or t
  misc_feature (1112)..(1112): n is a, c, g, or t
  misc_feature (1115)..(1115): n is a, c, g, or t
  misc_feature (1125)..(1125): n is a, c, g, or t
  misc_feature (1128)..(1128): n is a, c, g, or t
  misc_feature (1142)..(1142): n is a, c, g, or t
  misc_feature (1152)..(1152): n is a, c, g, or t
  misc_feature (1157)..(1157): n is a, c, g, or t
  misc_feature (1170)..(1170): n is a, c, g, or t
  misc_feature (1183)..(1183): n is a, c, g, or t
  misc_feature (1192)..(1192): n is a, c, g, or t
  misc_feature (1197)..(1197): n is a, c, g, or t
  misc_feature (1208)..(1208): n is a, c, g, or t
  misc_feature (1213)..(1213): n is a, c, g, or t
  misc_feature (1218)..(1218): n is a, c, g, or t
  misc_feature (1221)..(1222): n is a, c, g, or t
  misc_feature (1227)..(1227): n is a, c, g, or t
  misc_feature (1231)..(1232): n is a, c, g, or t
  misc_feature (1234)..(1234): n is a, c, g, or t
  misc_feature (1240)..(1241): n is a, c, g, or t
  misc_feature (1244)..(1245): n is a, c, g, or t
  misc_feature (1253)..(1253): n is a, c, g, or t
  misc_feature (1257)..(1257): n is a, c, g, or t
  misc_feature (1262)..(1263): n is a, c, g, or t
  misc_feature (1285)..(1285): n is a, c, g, or t
  misc_feature (1288)..(1288): n is a, c, g, or t
  misc_feature (1290)..(1290): n is a, c, g, or t
  misc_feature (1297)..(1297): n is a, c, g, or t
  misc_feature (1306)..(1306): n is a, c, g, or t
  misc_feature (1310)..(1310): n is a, c, g, or t
  misc_feature (1319)..(1319): n is a, c, g, or t
  misc_feature (1322)..(1322): n is a, c, g, or t
  misc_feature (1325)..(1325): n is a, c, g, or t
  misc_feature (1329)..(1329): n is a, c, g, or t
  misc_feature (1339)..(1339): n is a, c, g, or t
  misc_feature (1346)..(1346): n is a, c, g, or t
  misc_feature (1351)..(1351): n is a, c, g, or t
  misc_feature (1355)..(1355): n is a, c, g, or t
  misc_feature (1358)..(1358): n is a, c, g, or t
  misc_feature (1360)..(1360): n is a, c, g, or t
  misc_feature (1365)..(1365): n is a, c, g, or t
caaatagagaaattactatgagaggatcgcatcaccatcaccatcacggatcctatttaggtgacactatagaatcgtcgacccacgcgtccgcggcggcggcggtggcggcggcgactgctgcggtgaaggaggaggaggagccgagcgggcgctggcaccgaggcctgaccatggacgaggaatacgatgtgatcgtgctggggaccggtctcaccgaatgcatcctgtcgggcatcatgtctgtgaacgggaagaaggtgctgcacatggaccggaacccctactacgggggcgagagctcctccatcacacccctggaggagctgtataagcgttttcagttgctggaggggccccctgagtcgatgggccgaggccgagactggaatgttgacctgattcccaaattcctcatggctaacgggcagctggtaaagatgctactgtatacagaggtgactcgctacctggacttcaaggtggtggagggcagctttgtctacaaggggggcaagatctacaaagtgccgtccactgagactgaggccttggcttccaatctgatgggcatgtttgagaaacggcgcttccgcaagttcctggtgtttgtggcaaacttcgatgagaatgaccccaagacctttgagggcgttgacccccagactaccagcatgcgtgacgtctaccggaagtttgatctgggccaggatgtcatcgatttcactggccatgccctggcgctctaccgcactgatgactacctgnaccagccctgccttgaaaccgtcaacccgcatcaagttgtacagtgagtccctggccccggtatggcaagancccatatttatacccgctctacggcttgggcganctgcccccaaggnttttgcaagantgaattgccatctatgggggggaaatatatngctnaaacaaaacctgtggatgaacatcctccntgaanaaacggcaaaggttggtgggccttnaantctaaanaaanaagttggccccncctnccaacaattnnncntntaanccccaanctacntccccggaaccntntnncaaaagcttgnccaaatttatcccccatnntcnngttatcnttnaacccccccnttnaaaaaaccaacctnaacccaattnctttncaaaataatcttncccccaaaaaccngttcaaaangaaancaaaacttctncctgntcttnaannctccnattnncncaaatnnccnnccccaggnaaanaaaannctttcccacccccttttttganacncnccccctnaaataaaangtanacctctttntanatntttnaacccctttncaaaaanttttncttncangnctttntaaacccccttttt

SEQ ID NO: 384 - DNA, 1426 bp, Homo Sapiens
  misc_feature (706)..(706): n is a, c, g, or t
  misc_feature (814)..(814): n is a, c, g, or t
  misc_feature (854)..(854): n is a, c, g, or t
  misc_feature (864)..(864): n is a, c, g, or t
  misc_feature (883)..(883): n is a, c, g, or t
  misc_feature (886)..(886): n is a, c, g, or t
  misc_feature (902)..(902): n is a, c, g, or t
  misc_feature (909)..(909): n is a, c, g, or t
  misc_feature (913)..(913): n is a, c, g, or t
  misc_feature (919)..(919): n is a, c, g, or t
  misc_feature (925)..(925): n is a, c, g, or t
  misc_feature (939)..(939): n is a, c, g, or t
  misc_feature (947)..(947): n is a, c, g, or t
  misc_feature (950)..(950): n is a, c, g, or t
  misc_feature (959)..(960): n is a, c, g, or t
  misc_feature (963)..(963): n is a, c, g, or t
  misc_feature (969)..(969): n is a, c, g, or t
  misc_feature (971)..(971): n is a, c, g, or t
  misc_feature (982)..(983): n is a, c, g, or t
  misc_feature (998)..(998): n is a, c, g, or t
  misc_feature (1000)..(1000): n is a, c, g, or t
  misc_feature (1003)..(1003): n is a, c, g, or t
  misc_feature (1006)..(1006): n is a, c, g, or t
  misc_feature (1018)..(1018): n is a, c, g, or t
  misc_feature (1020)..(1020): n is a, c, g, or t
  misc_feature (1022)..(1022): n is a, c, g, or t
  misc_feature (1024)..(1024): n is a, c, g, or t
  misc_feature (1030)..(1030): n is a, c, g, or t
  misc_feature (1044)..(1044): n is a, c, g, or t
  misc_feature (1073)..(1073): n is a, c, g, or t
  misc_feature (1084)..(1084): n is a, c, g, or t
  misc_feature (1091)..(1092): n is a, c, g, or t
  misc_feature (1107)..(1107): n is a, c, g, or t
  misc_feature (1111)..(1111): n is a, c, g, or t
  misc_feature (1113)..(1113): n is a, c, g, or t
  misc_feature (1120)..(1120): n is a, c, g, or t
  misc_feature (1127)..(1127): n is a, c, g, or t
  misc_feature (1132)..(1132): n is a, c, g, or t
  misc_feature (1135)..(1135): n is a, c, g, or t
  misc_feature (1137)..(1138): n is a, c, g, or t
  misc_feature (1152)..(1152): n is a, c, g, or t
  misc_feature (1161)..(1163): n is a, c, g, or t
  misc_feature (1165)..(1166): n is a, c, g, or t
  misc_feature (1178)..(1178): n is a, c, g, or t
  misc_feature (1189)..(1189): n is a, c, g, or t
  misc_feature (1191)..(1192): n is a, c, g, or t
  misc_feature (1203)..(1203): n is a, c, g, or t
  misc_feature (1207)..(1207): n is a, c, g, or t
  misc_feature (1212)..(1212): n is a, c, g, or t
  misc_feature (1215)..(1217): n is a, c, g, or t
  misc_feature (1225)..(1225): n is a, c, g, or t
  misc_feature (1231)..(1231): n is a, c, g, or t
  misc_feature (1235)..(1235): n is a, c, g, or t
  misc_feature (1238)..(1239): n is a, c, g, or t
  misc_feature (1260)..(1260): n is a, c, g, or t
  misc_feature (1264)..(1264): n is a, c, g, or t
  misc_feature (1268)..(1269): n is a, c, g, or t
  misc_feature (1271)..(1271): n is a, c, g, or t
  misc_feature (1284)..(1284): n is a, c, g, or t
  misc_feature (1287)..(1287): n is a, c, g, or t
  misc_feature (1291)..(1291): n is a, c, g, or t
  misc_feature (1293)..(1295): n is a, c, g, or t
  misc_feature (1298)..(1298): n is a, c, g, or t
  misc_feature (1302)..(1302): n is a, c, g, or t
  misc_feature (1305)..(1305): n is a, c, g, or t
  misc_feature (1310)..(1310): n is a, c, g, or t
  misc_feature (1315)..(1315): n is a, c, g, or t
  misc_feature (1320)..(1320): n is a, c, g, or t
  misc_feature (1325)..(1325): n is a, c, g, or t
  misc_feature (1327)..(1327): n is a, c, g, or t
  misc_feature (1332)..(1332): n is a, c, g, or t
  misc_feature (1343)..(1343): n is a, c, g, or t
  misc_feature (1345)..(1350): n is a, c, g, or t
  misc_feature (1355)..(1355): n is a, c, g, or t
  misc_feature (1360)..(1362): n is a, c, g, or t
  misc_feature (1366)..(1366): n is a, c, g, or t
  misc_feature (1368)..(1370): n is a, c, g, or t
  misc_feature (1373)..(1373): n is a, c, g, or t
  misc_feature (1375)..(1375): n is a, c, g, or t
  misc_feature (1378)..(1378): n is a, c, g, or t
  misc_feature (1380)..(1380): n is a, c, g, or t
  misc_feature (1384)..(1384): n is a, c, g, or t
  misc_feature (1389)..(1389): n is a, c, g, or t
  misc_feature (1391)..(1391): n is a, c, g, or t
  misc_feature (1393)..(1394): n is a, c, g, or t
  misc_feature (1397)..(1397): n is a, c, g, or t
  misc_feature (1399)..(1399): n is a, c, g, or t
  misc_feature (1401)..(1402): n is a, c, g, or t
  misc_feature (1407)..(1407): n is a, c, g, or t
  misc_feature (1409)..(1409): n is a, c, g, or t
  misc_feature (1411)..(1411): n is a, c, g, or t
  misc_feature (1414)..(1414): n is a, c, g, or t
  misc_feature (1418)..(1419): n is a, c, g, or t
  misc_feature (1421)..(1421): n is a, c, g, or t
caatagagaaattactatgagaggatcgcatcaccatcaccatcacggatcctatttaggtgacactatagaatcgtcgacccacgcgtccgcccacgcgtccgcccacgcgtccgcccacgcgtccggtcctggtgacgagtcccgcgttctctccttgaatccactcgccagcccgccgccctctgccgccgcaccctgcacacccgcccctctcctgtgccaggaacttgctactaccagcaccatgccctaccaatatccagcactgaccccggagcagaagaaggagctgtctgacatcgctcaccgcatcgtggcacctggcaagggcatcctggctgcagatgagtccactgggagcattgccaagcggctgcagtccattggcaccgagaacaccgaggagaaccggcgcttctaccgccagctgctgctgacagctgacgaccgcgtgaacccctgcattgggggtgtcatcctcttccatgagacactctaccagaaggcggatgatgggcgtcccttcccccaagttatcaaatccaagggcggtgttgtgggcatcaaggtagacaagggcgtggtccccctggcagggacaaatggcgagactaccacccaagggttggatgggctgtctgagcgctgtgcccagtacaagaaggacggagctgacttcgccaagtggcgttgtgtgctgaanattggggaacacaccccctcagccctcgccatcatggaaaatgccaatgtttctggcccgttatgccagtatctgccagcaagaatggcattgtgccccatcgtggancctgagatcctccctgatgggggaccatgacttgaagcgntgccagtaangtgaccaaaaaaggtgctnggnctgctgtctacaaggntctgaantgancaccanatctancctggaaaggcacnttggcttnaancccaacatnntcnccccangnccatgctttgnnaatcaaaaatttttntnatnagnaaaaattgccantngncnaaccgntaaaagagtatgcncccgaaaaaatggccccccgcctgttaanggaaatcaccnttccttnnctggaagccaaaatnaagnanaaaggcntccatcnaaacntcnanngccatttaaaaaantcccccccnnntnnaaaacccttggntcctttaattntnntttaagggcanaaancctgnaannncttttctntaaagncctngtnnggaaaaaaaaaaaaacctaanattncctnntnaaaatatattaanacnaccntnnnaanattnttntttanaaaanaaaanaatananaattnattaattatanannnnnnaatanttttnnntatnannnatnanatntnaatnttaanantnnctnanannaagantntnctntctnntnataag

SEQ ID NO: 385 - DNA, 1519 bp, Homo Sapiens
  misc_feature (581)..(581): n is a, c, g, or t
  misc_feature (645)..(645): n is a, c, g, or t
  misc_feature (731)..(731): n is a, c, g, or t
  misc_feature (734)..(734): n is a, c, g, or t
  misc_feature (750)..(750): n is a, c, g, or t
  misc_feature (759)..(759): n is a, c, g, or t
  misc_feature (796)..(797): n is a, c, g, or t
  misc_feature (802)..(802): n is a, c, g, or t
  misc_feature (816)..(816): n is a, c, g, or t
  misc_feature (825)..(826): n is a, c, g, or t
  misc_feature (861)..(861): n is a, c, g, or t
  misc_feature (872)..(872): n is a, c, g, or t
  misc_feature (878)..(878): n is a, c, g, or t
  misc_feature (882)..(882): n is a, c, g, or t
  misc_feature (887)..(887): n is a, c, g, or t
  misc_feature (901)..(901): n is a, c, g, or t
  misc_feature (906)..(906): n is a, c, g, or t
  misc_feature (915)..(915): n is a, c, g, or t
  misc_feature (918)..(918): n is a, c, g, or t
  misc_feature (922)..(922): n is a, c, g, or t
  misc_feature (924)..(924): n is a, c, g, or t
  misc_feature (948)..(948): n is a, c, g, or t
  misc_feature (951)..(952): n is a, c, g, or t
  misc_feature (957)..(957): n is a, c, g, or t
  misc_feature (960)..(960): n is a, c, g, or t
  misc_feature (968)..(970): n is a, c, g, or t
  misc_feature (972)..(972): n is a, c, g, or t
  misc_feature (976)..(976): n is a, c, g, or t
  misc_feature (985)..(985): n is a, c, g, or t
  misc_feature (988)..(988): n is a, c, g, or t
  misc_feature (993)..(993): n is a, c, g, or t
  misc_feature (1000)..(1000): n is a, c, g, or t
  misc_feature (1003)..(1005): n is a, c, g, or t
  misc_feature (1012)..(1012): n is a, c, g, or t
  misc_feature (1014)..(1014): n is a, c, g, or t
  misc_feature (1020)..(1021): n is a, c, g, or t
  misc_feature (1024)..(1024): n is a, c, g, or t
  misc_feature (1029)..(1029): n is a, c, g, or t
  misc_feature (1042)..(1042): n is a, c, g, or t
  misc_feature (1045)..(1045): n is a, c, g, or t
  misc_feature (1048)..(1048): n is a, c, g, or t
  misc_feature (1052)..(1052): n is a, c, g, or t
  misc_feature (1054)..(1054): n is a, c, g, or t
  misc_feature (1058)..(1058): n is a, c, g, or t
  misc_feature (1063)..(1066): n is a, c, g, or t
  misc_feature (1070)..(1070): n is a, c, g, or t
  misc_feature (1077)..(1077): n is a, c, g, or t
  misc_feature (1080)..(1080): n is a, c, g, or t
  misc_feature (1086)..(1086): n is a, c, g, or t
  misc_feature (1088)..(1088): n is a, c, g, or t
  misc_feature (1091)..(1095): n is a, c, g, or t
  misc_feature (1097)..(1098): n is a, c, g, or t
  misc_feature (1100)..(1101): n is a, c, g, or t
  misc_feature (1103)..(1104): n is a, c, g, or t
  misc_feature (1108)..(1108): n is a, c, g, or t
  misc_feature (1110)..(1110): n is a, c, g, or t
  misc_feature (1112)..(1112): n is a, c, g, or t
  misc_feature (1115)..(1115): n is a, c, g, or t
  misc_feature (1120)..(1120): n is a, c, g, or t
  misc_feature (1126)..(1127): n is a, c, g, or t
  misc_feature (1133)..(1133): n is a, c, g, or t
  misc_feature (1142)..(1142): n is a, c, g, or t
  misc_feature (1144)..(1145): n is a, c, g, or t
  misc_feature (1155)..(1155): n is a, c, g, or t
  misc_feature (1157)..(1157): n is a, c, g, or t
  misc_feature (1159)..(1161): n is a, c, g, or t
  misc_feature (1169)..(1169): n is a, c, g, or t
  misc_feature (1178)..(1178): n is a, c, g, or t
  misc_feature (1181)..(1181): n is a, c, g, or t
  misc_feature (1185)..(1185): n is a, c, g, or t
  misc_feature (1187)..(1187): n is a, c, g, or t
  misc_feature (1195)..(1195): n is a, c, g, or t
  misc_feature (1197)..(1197): n is a, c, g, or t
  misc_feature (1207)..(1208): n is a, c, g, or t
  misc_feature (1211)..(1211): n is a, c, g, or t
  misc_feature (1215)..(1215): n is a, c, g, or t
  misc_feature (1218)..(1218): n is a, c, g, or t
  misc_feature (1221)..(1221): n is a, c, g, or t
  misc_feature (1227)..(1227): n is a, c, g, or t
  misc_feature (1229)..(1229): n is a, c, g, or t
  misc_feature (1234)..(1234): n is a, c, g, or t
  misc_feature (1239)..(1239): n is a, c, g, or t
  misc_feature (1245)..(1249): n is a, c, g, or t
  misc_feature (1255)..(1256): n is a, c, g, or t
  misc_feature (1258)..(1258): n is a, c, g, or t
  misc_feature (1261)..(1262): n is a, c, g, or t
  misc_feature (1264)..(1264): n is a, c, g, or t
  misc_feature (1266)..(1266): n is a, c, g, or t
  misc_feature (1268)..(1268): n is a, c, g, or t
  misc_feature (1274)..(1274): n is a, c, g, or t
  misc_feature (1276)..(1276): n is a, c, g, or t
  misc_feature (1279)..(1279): n is a, c, g, or t
  misc_feature (1284)..(1285): n is a, c, g, or t
  misc_feature (1287)..(1287): n is a, c, g, or t
  misc_feature (1301)..(1301): n is a, c, g, or t
  misc_feature (1303)..(1304): n is a, c, g, or t
  misc_feature (1308)..(1308): n is a, c, g, or t
  misc_feature (1312)..(1312): n is a, c, g, or t
  misc_feature (1315)..(1316): n is a, c, g, or t
  misc_feature (1320)..(1321): n is a, c, g, or t
  misc_feature (1330)..(1331): n is a, c, g, or t
  misc_feature (1334)..(1334): n is a, c, g, or t
  misc_feature (1340)..(1340): n is a, c, g, or t
  misc_feature (1343)..(1343): n is a, c, g, or t
  misc_feature (1348)..(1348): n is a, c, g, or t
  misc_feature (1361)..(1361): n is a, c, g, or t
  misc_feature (1365)..(1365): n is a, c, g, or t
  misc_feature (1368)..(1368): n is a, c, g, or t
  misc_feature (1373)..(1373): n is a, c, g, or t
  misc_feature (1375)..(1377): n is a, c, g, or t
  misc_feature (1391)..(1391): n is a, c, g, or t
  misc_feature (1401)..(1401): n is a, c, g, or t
  misc_feature (1403)..(1405): n is a, c, g, or t
  misc_feature (1408)..(1408): n is a, c, g, or t
  misc_feature (1410)..(1410): n is a, c, g, or t
  misc_feature (1415)..(1415): n is a, c, g, or t
  misc_feature (1420)..(1420): n is a, c, g, or t
  misc_feature (1423)..(1423): n is a, c, g, or t
  misc_feature (1425)..(1426): n is a, c, g, or t
  misc_feature (1431)..(1431): n is a, c, g, or t
  misc_feature (1438)..(1438): n is a, c, g, or t
  misc_feature (1445)..(1445): n is a, c, g, or t
  misc_feature (1453)..(1453): n is a, c, g, or t
  misc_feature (1455)..(1455): n is a, c, g, or t
  misc_feature (1457)..(1458): n is a, c, g, or t
  misc_feature (1460)..(1462): n is a, c, g, or t
  misc_feature (1465)..(1465): n is a, c, g, or t
  misc_feature (1468)..(1468): n is a, c, g, or t
  misc_feature (1478)..(1478): n is a, c, g, or t
  misc_feature (1481)..(1481): n is a, c, g, or t
  misc_feature (1486)..(1486): n is a, c, g, or t
  misc_feature (1512)..(1512): n is a, c, g, or t
  misc_feature (1515)..(1515): n is a, c, g, or t
  misc_feature (1519)..(1519): n is a, c, g, or t
atagagaaattactatgagaggatcgcatcaccatcaccatcacggatcctatttaggtgacactatagaatcgtcgacccacgcgtccgggccgctgtacatgagcaccaagaacaccatactgaaagcctacgatgggcgtttcaaggacatcttccaggagatctttgacaagcactataagaccgacttcgacaagaataagatctggtatgagcaccggctcattgatgacatggtggctcaggtcctcaagtcttcgggtggctttgtgtgggcctgcaagaactatgacggagatgtgcagtcagacatcctggcccagggctttggctcccttggcctgatgacgtccgtcctggtctgccctgatgggaagacgattgaggctgaggccgctcatgggaccgtcacccgccactatcgggagcaccagaagggccggcccaccagcaccaaccccatcgccagcatctttgcctggacacgtggcctggagcaccgggggaagctggatgggaaccaagacctcatcaggtttgcccagatgctggagaaggtgtgcgtggagacggtgganagtggagccatgaccaaggacctggcgggctgcattcacggcctcagcaatgtgaagctgaacnagcacttcctgaacaccacggacttcctcgacaccatcaagagcaacctgttacagagccctgggcaggccagtagggggaggcgnccncccatggctgcagtgnaggggccanggcttgaaccggcgggtcctcctgaacgcgggcaaanngtgancctcacaacccctnctctggaannccttttctaggggaatggttttttttataagcccngaatgtttttnaaaaancaanatggngtgttttcccctcntaggngaccttaangcnaagnanccattgcctttttttacctccacnccnntccanaangttttttnnnanactngcaaatttnaantctgncccttgnaannnattggcngncccatnnttnacctnactaaaaaacctnctnccnaaanantaanacctnnnntaanattattnatnacatcntntannnnncnnanntnnttcncncncanatacnttactnncacacnactacaaancnncatcacaatncnannntatatatnttcccattncantccncncaattcantnacactcacannatntaanttnacncatttncnaccanaatcnaataannnnntcaatnntnctnntnancnattacntntcncatanntncacttctattctcnannttcngtanttnntcanntctactacnnctnataccnatntctcnattattgatcatncatncanctctncnnntctagctcatactnctatcacacncnnntcncnttaancaaantantnnatccntaaacanactatanaatcacantnanncnnnacnccnatatattcanttnatatntcacatacattccatcaactctttcnatntcan

SEQ ID NO: 386 - DNA, 1372 bp, Homo Sapiens
  misc_feature (1)..(1): n is a, c, g, or t
  misc_feature (864)..(864): n is a, c, g, or t
  misc_feature (886)..(886): n is a, c, g, or t
  misc_feature (900)..(900): n is a, c, g, or t
  misc_feature (904)..(904): n is a, c, g, or t
  misc_feature (930)..(930): n is a, c, g, or t
  misc_feature (964)..(965): n is a, c, g, or t
  misc_feature (988)..(988): n is a, c, g, or t
  misc_feature (992)..(993): n is a, c, g, or t
  misc_feature (1032)..(1032): n is a, c, g, or t
  misc_feature (1034)..(1035): n is a, c, g, or t
  misc_feature (1040)..(1040): n is a, c, g, or t
  misc_feature (1052)..(1052): n is a, c, g, or t
  misc_feature (1059)..(1060): n is a, c, g, or t
  misc_feature (1064)..(1064): n is a, c, g, or t
  misc_feature (1083)..(1083): n is a, c, g, or t
  misc_feature (1086)..(1086): n is a, c, g, or t
  misc_feature (1088)..(1088): n is a, c, g, or t
  misc_feature (1092)..(1094): n is a, c, g, or t
  misc_feature (1096)..(1097): n is a, c, g, or t
  misc_feature (1099)..(1100): n is a, c, g, or t
  misc_feature (1102)..(1205): n is a, c, g, or t
  misc_feature (1213)..(1247): n is a, c, g, or t
  misc_feature (1254)..(1259): n is a, c, g, or t
  misc_feature (1261)..(1261): n is a, c, g, or t
  misc_feature (1263)..(1263): n is a, c, g, or t
  misc_feature (1265)..(1272): n is a, c, g, or t
  misc_feature (1280)..(1280): n is a, c, g, or t
  misc_feature (1288)..(1289): n is a, c, g, or t
  misc_feature (1291)..(1291): n is a, c, g, or t
  misc_feature (1297)..(1298): n is a, c, g, or t
  misc_feature (1300)..(1302): n is a, c, g, or t
  misc_feature (1313)..(1313): n is a, c, g, or t
  misc_feature (1316)..(1318): n is a, c, g, or t
  misc_feature (1326)..(1326): n is a, c, g, or t
  misc_feature (1334)..(1334): n is a, c, g, or t
  misc_feature (1342)..(1342): n is a, c, g, or t
  misc_feature (1346)..(1346): n is a, c, g, or t
  misc_feature (1348)..(1348): n is a, c, g, or t
  misc_feature (1354)..(1354): n is a, c, g, or t
  misc_feature (1356)..(1356): n is a, c, g, or t
  misc_feature (1360)..(1360): n is a, c, g, or t
  misc_feature (1364)..(1366): n is a, c, g, or t
naatagagaaattactatgagaggatcgcatcaccatcaccatcacggatcctatttaggtgacactatagaatcgtcgacccacgcgtccggacaggttgaactcattcctaatggtgtaaatataccagtcactccacagaatgtatatgagtatgtgcggaaatacgcagaacacagaatgttggtagttgcagaacagcccttacatgcaatgaggaaaggtctactagatgtgcttccaaaaaattcattagaagatttaacggcagaagattttaggcttttggtaaatggctgcggtgaagtcaatgtgcaaatgctgatcagttttacctctttcaatgatgaatcaggagaaaatgctgagaagcttctgcagttcaagcgttggttctggtcaatagtagagaagatgagcatgacagaacgacaagatcttgtttacttttggacatcaagcccatcactgccagccagtgaagaaggattccagcctatgccctcaatcacaataagaccaccagatgaccaacatcttcctactgcaaatacttgcatttctcgactttacgtcccactctattcctctaaacagattctcaaacagaaattgttactcgccattaagaccaagaattttggttttgtgtagagtataaaaagtgtgtattgctgtgtaatattactagcaaattttgtagatttttttccatttgtctataaaagtttatggaagttaatgctgtcatacccccctggtggtaccttaaagagataaaatgcagacattccttgctgagtttatagcttaaaggcctaaggagcactagcaacatttggctatattgggtttgctagtcnccaacttctgggtctaaccccngccaaaagatgacngcanaaccaccataattttaccctggggantttatcttttttgccgaagggggaaaaaaaatgnnaaatgttcctgaaaaattccccngccnnccttttggggaaaacggtttcccccaaaaggtttctttntnnaaaangggaaaaagggnaattttnnaaanaaaaaattttagttttggnaananaaannnannannannnnnnnnnnnnnnnnnnnnnnnnnnnnnnnnnnnnnnnnnnnnnnnnnnnnnnnnnnnnnnnnnnnnnnnnnnnnnnnnnnnnnnnnnnnnnnnnnnnnnnnncccccccnnnnnnnnnnnnnnnnnnnnnnnnnnnnnnnnnnnccccccnnnnnnanancnnnnnnnncccccccncccccccnntntttttnncnnnccccccccccncgnnntttttttntgagaaancccccccngggngnttttcncnacanaccnnnaaaaaa

SEQ ID NO: 387 - DNA, 1286 bp, Homo Sapiens
  misc_feature (16)..(16): n is a, c, g, or t
  misc_feature (873)..(873): n is a, c, g, or t
  misc_feature (896)..(896): n is a, c, g, or t
  misc_feature (914)..(914): n is a, c, g, or t
  misc_feature (919)..(919): n is a, c, g, or t
  misc_feature (929)..(929): n is a, c, g, or t
  misc_feature (936)..(936): n is a, c, g, or t
  misc_feature (940)..(940): n is a, c, g, or t
  misc_feature (950)..(950): n is a, c, g, or t
  misc_feature (959)..(959): n is a, c, g, or t
  misc_feature (961)..(961): n is a, c, g, or t
  misc_feature (986)..(986): n is a, c, g, or t
  misc_feature (989)..(990): n is a, c, g, or t
  misc_feature (992)..(992): n is a, c, g, or t
  misc_feature (994)..(995): n is a, c, g, or t
  misc_feature (997)..(998): n is a, c, g, or t
  misc_feature (1003)..(1003): n is a, c, g, or t
  misc_feature (1006)..(1006): n is a, c, g, or t
  misc_feature (1012)..(1013): n is a, c, g, or t
  misc_feature (1017)..(1018): n is a, c, g, or t
  misc_feature (1024)..(1024): n is a, c, g, or t
  misc_feature (1026)..(1026): n is a, c, g, or t
  misc_feature (1033)..(1033): n is a, c, g, or t
  misc_feature (1053)..(1053): n is a, c, g, or t
  misc_feature (1056)..(1056): n is a, c, g, or t
  misc_feature (1058)..(1059): n is a, c, g, or t
  misc_feature (1061)..(1061): n is a, c, g, or t
  misc_feature (1067)..(1067): n is a, c, g, or t
  misc_feature (1069)..(1069): n is a, c, g, or t
  misc_feature (1073)..(1073): n is a, c, g, or t
  misc_feature (1082)..(1082): n is a, c, g, or t
  misc_feature (1092)..(1092): n is a, c, g, or t
  misc_feature (1098)..(1098): n is a, c, g, or t
  misc_feature (1111)..(1111): n is a, c, g, or t
  misc_feature (1116)..(1116): n is a, c, g, or t
  misc_feature (1126)..(1126): n is a, c, g, or t
  misc_feature (1130)..(1130): n is a, c, g, or t
  misc_feature (1146)..(1146): n is a, c, g, or t
  misc_feature (1155)..(1155): n is a, c, g, or t
  misc_feature (1166)..(1167): n is a, c, g, or t
  misc_feature (1169)..(1169): n is a, c, g, or t
  misc_feature (1171)..(1172): n is a, c, g, or t
  misc_feature (1175)..(1175): n is a, c, g, or t
  misc_feature (1178)..(1178): n is a, c, g, or t
  misc_feature (1180)..(1180): n is a, c, g, or t
  misc_feature (1184)..(1184): n is a, c, g, or t
  misc_feature (1191)..(1193): n is a, c, g, or t
  misc_feature (1198)..(1198): n is a, c, g, or t
  misc_feature (1208)..(1210): n is a, c, g, or t
  misc_feature (1212)..(1212): n is a, c, g, or t
  misc_feature (1222)..(1222): n is a, c, g, or t
  misc_feature (1263)..(1263): n is a, c, g, or t
  misc_feature (1265)..(1265): n is a, c, g, or t
  misc_feature (1270)..(1270): n is a, c, g, or t
  misc_feature (1276)..(1276): n is a, c, g, or t
attgagaaattactangagaggatcgcatcaccatcaccatcacggatcctatttaggtgacactatagaatcgtcgacccacgcgtccggttacagcccagaatcccaggctcagtctgtccatcatcaaagaccaggttcaagggtctctccagaaaatcttgtggacaaatccaggggaagtaggcctggaaaatccccagagaggagtcacgtctcttcggagccctacgagcccatctccccaccccaggttccggttgtgcatgagaaacaggacagcttgctgctcttgtctcagaggggcgcagagcctgcagagcagaggaatgatgcccgctcaccagggagtataagctacttgccttcattcttcaccaagcttgaaaatacatcacccatggttaaatcaaagaagcaggagatttttcgtaagttgaactcctctggtggaggtgactctgatatggcagctgctcagccaggaactgagatctttaatctgccagcagttactacgtcaggctcagttagctctagaggccattcttttgctgatcctgccagtaatcttgggctggaagacattatcaggaaggctctcatgggaagctttgatgacaaagttgaggatcatggagttgtcatgtcccagcctatgggagtagtgcctggtactgccaacacctcagttgtgaccagtggtgagacacgaagagaggaaggggacccatcacctcattcaggaggagtttgcaaaccaaagctgatcagcaagtcaaacagcaggaaaatctaagtctcctatacctgggcaaggctacttaggaacggaacggcccctctttcagtctcctctgtacattcagaanggggattaccataaggcaaaacnccaggggggggcctgggnaaaanagggccctcnttcaaangggnttcaactcanttttccttnanaaaccctcctgaactatggcggaangcnncnannanntactnccnccaaanncccnnattggnanggggccncccccctggggggggaaacnaanannantttccntncccnaaaaaaaanaaggattttngggaanggaaaaaccttgnccccnattggttttntaanaaaaaaaaaaaaaaanccccgttcnggaaaaagggnntnannggnaancncccnaaaattnnnggggnaaaaaggggnnncnaaaaaaaggnaaatccccaaattttttggggggtttaatttttttaaaaangnggggnaaaaancccgcccccc

SEQ ID NO: 388 - DNA, 1378 bp, Homo Sapiens
  misc_feature (455)..(455): n is a, c, g, or t
  misc_feature (458)..(458): n is a, c, g, or t
  misc_feature (486)..(486): n is a, c, g, or t
  misc_feature (488)..(488): n is a, c, g, or t
  misc_feature (526)..(526): n is a, c, g, or t
  misc_feature (559)..(559): n is a, c, g, or t
  misc_feature (581)..(582): n is a, c, g, or t
  misc_feature (599)..(599): n is a, c, g, or t
  misc_feature (620)..(620): n is a, c, g, or t
  misc_feature (627)..(627): n is a, c, g, or t
  misc_feature (629)..(629): n is a, c, g, or t
  misc_feature (649)..(649): n is a, c, g, or t
  misc_feature (654)..(654): n is a, c, g, or t
  misc_feature (660)..(660): n is a, c, g, or t
  misc_feature (671)..(671): n is a, c, g, or t
  misc_feature (674)..(674): n is a, c, g, or t
  misc_feature (676)..(676): n is a, c, g, or t
  misc_feature (684)..(684): n is a, c, g, or t
  misc_feature (687)..(687): n is a, c, g, or t
  misc_feature (703)..(703): n is a, c, g, or t
  misc_feature (707)..(707): n is a, c, g, or t
  misc_feature (709)..(709): n is a, c, g, or t
  misc_feature (715)..(715): n is a, c, g, or t
  misc_feature (718)..(718): n is a, c, g, or t
  misc_feature (723)..(723): n is a, c, g, or t
  misc_feature (730)..(731): n is a, c, g, or t
  misc_feature (737)..(737): n is a, c, g, or t
  misc_feature (755)..(755): n is a, c, g, or t
  misc_feature (762)..(762): n is a, c, g, or t
  misc_feature (765)..(765): n is a, c, g, or t
  misc_feature (779)..(780): n is a, c, g, or t
  misc_feature (784)..(784): n is a, c, g, or t
  misc_feature (789)..(790): n is a, c, g, or t
  misc_feature (793)..(793): n is a, c, g, or t
  misc_feature (809)..(810): n is a, c, g, or t
  misc_feature (815)..(815): n is a, c, g, or t
  misc_feature (817)..(817): n is a, c, g, or t
  misc_feature (824)..(824): n is a, c, g, or t
  misc_feature (827)..(827): n is a, c, g, or t
  misc_feature (836)..(836): n is a, c, g, or t
  misc_feature (841)..(841): n is a, c, g, or t
  misc_feature (844)..(844): n is a, c, g, or t
  misc_feature (859)..(861): n is a, c, g, or t
  misc_feature (863)..(863): n is a, c, g, or t
  misc_feature (865)..(868): n is a, c, g, or t
  misc_feature (874)..(876): n is a, c, g, or t
  misc_feature (878)..(878): n is a, c, g, or t
  misc_feature (880)..(880): n is a, c, g, or t
  misc_feature (887)..(887): n is a, c, g, or t
  misc_feature (890)..(890): n is a, c, g, or t
  misc_feature (894)..(894): n is a, c, g, or t
  misc_feature (896)..(897): n is a, c, g, or t
  misc_feature (899)..(900): n is a, c, g, or t
  misc_feature (902)..(902): n is a, c, g, or t
  misc_feature (908)..(909): n is a, c, g, or t
  misc_feature (911)..(911): n is a, c, g, or t
  misc_feature (914)..(914): n is a, c, g, or t
  misc_feature (918)..(918): n is a, c, g, or t
  misc_feature (924)..(924): n is a, c, g, or t
  misc_feature (932)..(932): n is a, c, g, or t
  misc_feature (937)..(937): n is a, c, g, or t
  misc_feature (941)..(941): n is a, c, g, or t
  misc_feature (944)..(946): n is a, c, g, or t
  misc_feature (948)..(948): n is a, c, g, or t
  misc_feature (958)..(959): n is a, c, g, or t
  misc_feature (963)..(967): n is a, c, g, or t
  misc_feature (971)..(971): n is a, c, g, or t
  misc_feature (974)..(974): n is a, c, g, or t
  misc_feature (989)..(992): n is a, c, g, or t
  misc_feature (1006)..(1006): n is a, c, g, or t
  misc_feature (1011)..(1011): n is a, c, g, or t
  misc_feature (1017)..(1017): n is a, c, g, or t
  misc_feature (1021)..(1021): n is a, c, g, or t
  misc_feature (1027)..(1027): n is a, c, g, or t
  misc_feature (1041)..(1041): n is a, c, g, or t
  misc_feature (1046)..(1046): n is a, c, g, or t
  misc_feature (1053)..(1058): n is a, c, g, or t
  misc_feature (1067)..(1068): n is a, c, g, or t
  misc_feature (1072)..(1074): n is a, c, g, or t
  misc_feature (1079)..(1081): n is a, c, g, or t
  misc_feature (1095)..(1095): n is a, c, g, or t
  misc_feature (1098)..(1098): n is a, c, g, or t
  misc_feature (1102)..(1104): n is a, c, g, or t
  misc_feature (1108)..(1115): n is a, c, g, or t
  misc_feature (1128)..(1130): n is a, c, g, or t
  misc_feature (1132)..(1133): n is a, c, g, or t
  misc_feature (1135)..(1135): n is a, c, g, or t
  misc_feature (1141)..(1141): n is a, c, g, or t
  misc_feature (1145)..(1147): n is a, c, g, or t
  misc_feature (1149)..(1155): n is a, c, g, or t
  misc_feature (1159)..(1159): n is a, c, g, or t
  misc_feature (1169)..(1170): n is a, c, g, or t
  misc_feature (1172)..(1174): n is a, c, g, or t
  misc_feature (1191)..(1196): n is a, c, g, or t
  misc_feature (1198)..(1198): n is a, c, g, or t
  misc_feature (1202)..(1202): n is a, c, g, or t
  misc_feature (1214)..(1214): n is a, c, g, or t
  misc_feature (1219)..(1224): n is a, c, g, or t
  misc_feature (1228)..(1228): n is a, c, g, or t
  misc_feature (1233)..(1233): n is a, c, g, or t
  misc_feature (1240)..(1240): n is a, c, g, or t
  misc_feature (1256)..(1259): n is a, c, g, or t
  misc_feature (1261)..(1264): n is a, c, g, or t
  misc_feature (1276)..(1285): n is a, c, g, or t
  misc_feature (1289)..(1289): n is a, c, g, or t
  misc_feature (1296)..(1299): n is a, c, g, or t
  misc_feature (1306)..(1306): n is a, c, g, or t
  misc_feature (1323)..(1331): n is a, c, g, or t
  misc_feature (1344)..(1344): n is a, c, g, or t
  misc_feature (1357)..(1360): n is a, c, g, or t
  misc_feature (1363)..(1363): n is a, c, g, or t
  misc_feature (1366)..(1367): n is a, c, g, or t
  misc_feature (1376)..(1378): n is a, c, g, or t
atagagaaattactatgagaggatcgcatcaccatcaccatcacggatcctatttaggtgacactatagaatcgtcgacccacgcgtccggctccttgctcggccgggccgcggccatgggagaggccgaggtgggcggcgggggcgccgcaggcgacaagggcccgggggaggcggccaccagcccggcggaggagacagtggtgtggagccccgaggtggaggtgtgcctcttccacgccatgctgggccacaagcccgtcggtgtgaaccgacacttccacatgatttgtattcgggacaagttcagccagaacatcgggcggcaggtcccatccaaggtcatctgggaccatctgagcaccatgtacgacatgcaggcgctgcatgagtctgagattcttccattcccgaatccagagaggaacttcgtccttccagaagagatcattcangangtccgagaaggaaaagtgatgatagaanangagatgaaagaggagatgaaggaagacgtggacccccncaatggggctgacgatgtttttttttctttccnggagttttgggggaaagcatcnnaaaaaatccccccaaanacaaaaaaaaaaaactcctcnaaacttngnggtgcaaaaaaagggcaaanaaacngaaacncaaccgggtcnccnanaaattctnganccgaaaaaaaaaaccnttcnantcccantgntggcnaaagggnncccccncgtaaaaccctcaacccnttgtggnggncaaaaaaaaagggnnaagnaattnngtncccttaaagggtttgnntgggntnttaaatnccnccccccccnccccnaanggaaaaccatccccnnngntnnnnaccccnnntngnccccccnccngccntnnanntnaaaaanngnccncccnccgggnaaaaaaanggggntttnttnnnanccttttgggnncccnnnnngganccnaaaaaaaaaaaaaannnncccccccccaaaanttttngggggntttnaaaaanattttttttttttnttttnaaaaaannnnnnttttccccnngggnnnttttnnnaaaaaaaaaaaaanccncacnnngggnnnnnnnnttttttttttccnnncnncnaaaagngggnnngnnnnnnngggnaaaacccccnntnnnaaaaaaaaaaaaaaaannnnnntntttntttttaaaaaanccccnnnnnncccnggggnaaaaaantttttttttttttttnnnncnnnncccctttttttnnnnnnnnnnaaanaaaaaannnnctttttnccccccccccccccccnnnnnnnnnccccccccccccnaaaaaaaaaaaannnnttnttnnttttttttnnn

SEQ ID NO: 389 - DNA, 1365 bp, Homo Sapiens
  misc_feature (1)..(1): n is a, c, g, or t
  misc_feature (673)..(673): n is a, c, g, or t
  misc_feature (679)..(679): n is a, c, g, or t
  misc_feature (682)..(689): n is a, c, g, or t
  misc_feature (841)..(841): n is a, c, g, or t
  misc_feature (868)..(868): n is a, c, g, or t
  misc_feature (913)..(913): n is a, c, g, or t
  misc_feature (922)..(922): n is a, c, g, or t
  misc_feature (924)..(924): n is a, c, g, or t
  misc_feature (930)..(930): n is a, c, g, or t
  misc_feature (945)..(945): n is a, c, g, or t
  misc_feature (955)..(955): n is a, c, g, or t
  misc_feature (960)..(960): n is a, c, g, or t
  misc_feature (996)..(996): n is a, c, g, or t
  misc_feature (1001)..(1001): n is a, c, g, or t
  misc_feature (1023)..(1023): n is a, c, g, or t
  misc_feature (1038)..(1038): n is a, c, g, or t
  misc_feature (1044)..(1044): n is a, c, g, or t
  misc_feature (1055)..(1055): n is a, c, g, or t
  misc_feature (1058)..(1058): n is a, c, g, or t
  misc_feature (1066)..(1066): n is a, c, g, or t
  misc_feature (1071)..(1071): n is a, c, g, or t
  misc_feature (1073)..(1073): n is a, c, g, or t
  misc_feature (1075)..(1075): n is a, c, g, or t
  misc_feature (1093)..(1093): n is a, c, g, or t
  misc_feature (1098)..(1098): n is a, c, g, or t
  misc_feature (1101)..(1101): n is a, c, g, or t
  misc_feature (1103)..(1103): n is a, c, g, or t
  misc_feature (1105)..(1105): n is a, c, g, or t
  misc_feature (1109)..(1109): n is a, c, g, or t
  misc_feature (1118)..(1118): n is a, c, g, or t
  misc_feature (1123)..(1123): n is a, c, g, or t
  misc_feature (1126)..(1126): n is a, c, g, or t
  misc_feature (1134)..(1134): n is a, c, g, or t
  misc_feature (1151)..(1151): n is a, c, g, or t
  misc_feature (1174)..(1174): n is a, c, g, or t
  misc_feature (1180)..(1180): n is a, c, g, or t
  misc_feature (1186)..(1186): n is a, c, g, or t
  misc_feature (1188)..(1188): n is a, c, g, or t
  misc_feature (1190)..(1190): n is a, c, g, or t
  misc_feature (1193)..(1193): n is a, c, g, or t
  misc_feature (1202)..(1202): n is a, c, g, or t
  misc_feature (1205)..(1205): n is a, c, g, or t
  misc_feature (1209)..(1209): n is a, c, g, or t
  misc_feature (1219)..(1220): n is a, c, g, or t
  misc_feature (1232)..(1232): n is a, c, g, or t
  misc_feature (1238)..(1240): n is a, c, g, or t
  misc_feature (1247)..(1247): n is a, c, g, or t
  misc_feature (1252)..(1253): n is a, c, g, or t
  misc_feature (1262)..(1262): n is a, c, g, or t
  misc_feature (1272)..(1272): n is a, c, g, or t
  misc_feature (1278)..(1278): n is a, c, g, or t
  misc_feature (1292)..(1292): n is a, c, g, or t
  misc_feature (1295)..(1295): n is a, c, g, or t
  misc_feature (1299)..(1300): n is a, c, g, or t
  misc_feature (1313)..(1313): n is a, c, g, or t
  misc_feature (1315)..(1315): n is a, c, g, or t
  misc_feature (1320)..(1320): n is a, c, g, or t
  misc_feature (1322)..(1322): n is a, c, g, or t
  misc_feature (1332)..(1332): n is a, c, g, or t
  misc_feature (1335)..(1335): n is a, c, g, or t
  misc_feature (1339)..(1339): n is a, c, g, or t
  misc_feature (1346)..(1346): n is a, c, g, or t
  misc_feature (1360)..(1360): n is a, c, g, or t
  misc_feature (1365)..(1365): n is a, c, g, or t
naatagagaaattactatgagaggatcgcatcaccatcaccatcacggatcctatttaggtgacactatagaatcgtcgacccacgcgtccgcgacctacgcacacgagaacatgcctgtgagtgctttggtccaggtttcggcggagatctcgctgttctgtccgaactctcccctcacgctgatttcggatcgtagagggtcctcatttaccctctgcacttcttaggacattaactccagggaccgcagcggcccacgggccacccgcatagacgggagcggagaggagataagatggcggcccagctgcgcagacaccaggggcggcgaggggcgagctctccccgctcgcaaaggatctccttcatccctctccagaagaggagaagaggaaacacaagaagaaacgcctggtgcagagccccaattcctatttcatggatgtgaaatgcccaggatgctataaaatcaccacggtctttagccatgcacaaacggtagttttgtgtgttggctgctccactgtcctctgccagcctacaggaggaaaagcaaggcttacagaaggatgttccttcaggaggaagcagcactaaaagcactctgagtcaagatgagtgggaaaccatctcaataaacacattttggataaaaaaaaaaaaaaaaaaanaaaaanaannnnnnnnggggcggccgctccctatagtgagtcgtattaagcttaattagctgagcttggactcctgttgatagatccagtaatgacctcaaaactccatctggatttgttcaaaacgctcggttgccgccgggcgttttttattggtgagaatccaangctagcttggcgagattttcaggaacntaaggaagctaaaaatggaaaaaaaaatcactgggaatatacccnccgtttgananatcccnaatggcatcgtaaanaaaaattttngaagncatttcagtcagttgctcaatggaaccctataaccnaaacngttcagctgggatatttacggncctttttaaaaaacngtaaanaaaaaaaaaanccnaagttttnatccngncntttatttcaaatttcttngcccnccngnanaaangcccctccngaaanttncctaaggncaatgaaaaaaacgggnaaactgggggaaatgggaaaagntttccncccttntnanccngtttttccnagnaaanaaatgaaaannttttttcccccntgggannnaaaaccnccaannattttcggnaattttttancataanttcccaaaaagggnggntttnngggaaaacccggncnatttncnaaagggtttntgnaaanttttttncccccccacccccnggggn

SEQ ID NO: 390 - DNA, 1321 bp, Homo Sapiens
  misc_feature (1)..(2): n is a, c, g, or t
  misc_feature (802)..(802): n is a, c, g, or t
  misc_feature (804)..(806): n is a, c, g, or t
  misc_feature (808)..(808): n is a, c, g, or t
  misc_feature (810)..(846): n is a, c, g, or t
  misc_feature (849)..(849): n is a, c, g, or t
  misc_feature (867)..(868): n is a, c, g, or t
  misc_feature (871)..(871): n is a, c, g, or t
  misc_feature (881)..(881): n is a, c, g, or t
  misc_feature (890)..(890): n is a, c, g, or t
  misc_feature (911)..(911): n is a, c, g, or t
  misc_feature (922)..(923): n is a, c, g, or t
  misc_feature (953)..(953): n is a, c, g, or t
  misc_feature (958)..(958): n is a, c, g, or t
  misc_feature (960)..(962): n is a, c, g, or t
  misc_feature (966)..(966): n is a, c, g, or t
  misc_feature (968)..(968): n is a, c, g, or t
  misc_feature (970)..(970): n is a, c, g, or t
  misc_feature (973)..(973): n is a, c, g, or t
  misc_feature (977)..(977): n is a, c, g, or t
  misc_feature (987)..(987): n is a, c, g, or t
  misc_feature (991)..(991): n is a, c, g, or t
  misc_feature (1003)..(1003): n is a, c, g, or t
  misc_feature (1005)..(1007): n is a, c, g, or t
  misc_feature (1016)..(1016): n is a, c, g, or t
  misc_feature (1022)..(1023): n is a, c, g, or t
  misc_feature (1038)..(1038): n is a, c, g, or t
  misc_feature (1060)..(1061): n is a, c, g, or t
  misc_feature (1064)..(1064): n is a, c, g, or t
  misc_feature (1069)..(1069): n is a, c, g, or t
  misc_feature (1071)..(1072): n is a, c, g, or t
  misc_feature (1079)..(1080): n is a, c, g, or t
  misc_feature (1095)..(1095): n is a, c, g, or t
  misc_feature (1099)..(1099): n is a, c, g, or t
  misc_feature (1104)..(1104): n is a, c, g, or t
  misc_feature (1118)..(1119): n is a, c, g, or t
  misc_feature (1122)..(1123): n is a, c, g, or t
  misc_feature (1127)..(1130): n is a, c, g, or t
  misc_feature (1132)..(1132): n is a, c, g, or t
  misc_feature (1136)..(1139): n is a, c, g, or t
  misc_feature (1141)..(1144): n is a, c, g, or t
  misc_feature (1148)..(1149): n is a, c, g, or t
  misc_feature (1153)..(1155): n is a, c, g, or t
  misc_feature (1160)..(1161): n is a, c, g, or t
  misc_feature (1165)..(1168): n is a, c, g, or t
  misc_feature (1171)..(1171): n is a, c, g, or t
  misc_feature (1178)..(1178): n is a, c, g, or t
  misc_feature (1182)..(1182): n is a, c, g, or t
  misc_feature (1195)..(1196): n is a, c, g, or t
  misc_feature (1208)..(1208): n is a, c, g, or t
  misc_feature (1213)..(1213): n is a, c, g, or t
  misc_feature (1218)..(1220): n is a, c, g, or t
  misc_feature (1222)..(1224): n is a, c, g, or t
  misc_feature (1239)..(1239): n is a, c, g, or t
  misc_feature (1246)..(1246): n is a, c, g, or t
  misc_feature (1252)..(1252): n is a, c, g, or t
  misc_feature (1254)..(1256): n is a, c, g, or t
  misc_feature (1260)..(1261): n is a, c, g, or t
  misc_feature (1268)..(1268): n is a, c, g, or t
  misc_feature (1270)..(1272): n is a, c, g, or t
  misc_feature (1281)..(1282): n is a, c, g, or t
  misc_feature (1284)..(1287): n is a, c, g, or t
  misc_feature (1289)..(1289): n is a, c, g, or t
  misc_feature (1292)..(1294): n is a, c, g, or t
  misc_feature (1297)..(1299): n is a, c, g, or t
  misc_feature (1301)..(1301): n is a, c, g, or t
  misc_feature (1305)..(1305): n is a, c, g, or t
  misc_feature (1309)..(1309): n is a, c, g, or t
  misc_feature (1312)..(1313): n is a, c, g, or t
  misc_feature (1319)..(1319): n is a, c, g, or t
nnattagagaaattactatgagaggatcgcatcaccatcaccatcacggatcctatttaggtgacactatagaatcgtcgacccacgcgtccgcctacgaggacatcaaggagaacctggaatcccggcgcttccaggtggtggactcccgagccactggcaggttccgcggcaccgagcccgagccccgagacggcattgaacctggccacatcccaggtaccgtgaacatccccttcacagacttcctgagccaggaggggctggagaagagccctgaggagatccgccatctgttccaggagaagaaagtggacctgtctaagccactggtggccacgtgtggctctggcgtcacagcctgccacgtggcactaggggcctacctctgcggcaagccagacgtgcccatctacgatggctcctgggtggagtggtacatgcgcgcccggcccgaggatgtcatctcagagggccgggggaagacccactgaagctgggcaggacacaggcgagctcaggtgatgccggccaccagcaatgcctggcctggtagctccgcttctgctttcaccaagagagtgtttcttcactcaactcaggtggcatttggggtgacatctcaaaggccaggaattccgttgacttgttggctgccagtaggggcgggaggaaaggcggaggcgagccctggaggagggaggccacaactccgagctgcccacctggtgctgagctggggccccgcctcctttctgttttatttttgaggaaataaaataaccaagtgctaaaaaaaaanannnanannnnnnnnnnnnnnnnnnnnnnnnnnnnnnnnnnnnnaanggcggccgctccctatanngantcgtattaancttaattanctgaacttggactcttgtttnaaaaaatccannaatgacctcaaaactcctctggattttttnaaaancnnnggtngncnccngggntttttttttngggnaaaaatccaacntnnntttgggaanattttnngggaacttaaggaancttaaaatgggaaaaaaaaaannccngggantnnccccccnnttaaattttcccaangggnttctnaaaaaaaatttttnnggnntttnnnncntttnnnnannnnaccnnaaannnaaacnntttnnnnggnatttaangccntttttaaaaaccnnaaaaaaaaaaanccaanttttnnncnnncttttttaatttttncccccgnaaaaangnnncccnnaattttntnnnaaaaaaaannannnngnaannnaannntncccntttnacnntttttnaa

SEQ ID NO: 391 - DNA, 1390 bp, Homo Sapiens
  misc_feature (2)..(2): n is a, c, g, or t
  misc_feature (868)..(870): n is a, c, g, or t
  misc_feature (880)..(881): n is a, c, g, or t
  misc_feature (885)..(886): n is a, c, g, or t
  misc_feature (891)..(891): n is a, c, g, or t
  misc_feature (894)..(894): n is a, c, g, or t
  misc_feature (900)..(901): n is a, c, g, or t
  misc_feature (903)..(903): n is a, c, g, or t
  misc_feature (905)..(905): n is a, c, g, or t
  misc_feature (912)..(912): n is a, c, g, or t
  misc_feature (916)..(916): n is a, c, g, or t
  misc_feature (919)..(919): n is a, c, g, or t
  misc_feature (925)..(925): n is a, c, g, or t
  misc_feature (929)..(930): n is a, c, g, or t
  misc_feature (937)..(937): n is a, c, g, or t
  misc_feature (941)..(942): n is a, c, g, or t
  misc_feature (944)..(946): n is a, c, g, or t
  misc_feature (950)..(950): n is a, c, g, or t
  misc_feature (961)..(962): n is a, c, g, or t
  misc_feature (965)..(965): n is a, c, g, or t
  misc_feature (972)..(972): n is a, c, g, or t
  misc_feature (984)..(984): n is a, c, g, or t
  misc_feature (987)..(987): n is a, c, g, or t
  misc_feature (992)..(992): n is a, c, g, or t
  misc_feature (1000)..(1000): n is a, c, g, or t
  misc_feature (1003)..(1003): n is a, c, g, or t
  misc_feature (1010)..(1011): n is a, c, g, or t
  misc_feature (1015)..(1017): n is a, c, g, or t
  misc_feature (1036)..(1037): n is a, c, g, or t
  misc_feature (1042)..(1042): n is a, c, g, or t
  misc_feature (1062)..(1062): n is a, c, g, or t
  misc_feature (1077)..(1077): n is a, c, g, or t
  misc_feature (1084)..(1084): n is a, c, g, or t
  misc_feature (1088)..(1088): n is a, c, g, or t
  misc_feature (1099)..(1099): n is a, c, g, or t
  misc_feature (1101)..(1101): n is a, c, g, or t
  misc_feature (1109)..(1109): n is a, c, g, or t
  misc_feature (1112)..(1112): n is a, c, g, or t
  misc_feature (1115)..(1115): n is a, c, g, or t
  misc_feature (1122)..(1122): n is a, c, g, or t
  misc_feature (1124)..(1124): n is a, c, g, or t
  misc_feature (1126)..(1126): n is a, c, g, or t
  misc_feature (1134)..(1135): n is a, c, g, or t
  misc_feature (1143)..(1143): n is a, c, g, or t
  misc_feature (1152)..(1152): n is a, c, g, or t
  misc_feature (1159)..(1159): n is a, c, g, or t
  misc_feature (1167)..(1167): n is a, c, g, or t
  misc_feature (1169)..(1169): n is a, c, g, or t
  misc_feature (1172)..(1173): n is a, c, g, or t
  misc_feature (1184)..(1184): n is a, c, g, or t
  misc_feature (1193)..(1193): n is a, c, g, or t
  misc_feature (1198)..(1198): n is a, c, g, or t
  misc_feature (1200)..(1202): n is a, c, g, or t
  misc_feature (1204)..(1204): n is a, c, g, or t
  misc_feature (1215)..(1215): n is a, c, g, or t
  misc_feature (1223)..(1223): n is a, c, g, or t
  misc_feature (1228)..(1228): n is a, c, g, or t
  misc_feature (1231)..(1231): n is a, c, g, or t
  misc_feature (1236)..(1236): n is a, c, g, or t
  misc_feature (1238)..(1238): n is a, c, g, or t
  misc_feature (1240)..(1240): n is a, c, g, or t
  misc_feature (1243)..(1244): n is a, c, g, or t
  misc_feature (1247)..(1248): n is a, c, g, or t
  misc_feature (1261)..(1261): n is a, c, g, or t
  misc_feature (1264)..(1264): n is a, c, g, or t
  misc_feature (1268)..(1268): n is a, c, g, or t
  misc_feature (1278)..(1278): n is a, c, g, or t
  misc_feature (1287)..(1287): n is a, c, g, or t
  misc_feature (1299)..(1299): n is a, c, g, or t
  misc_feature (1305)..(1305): n is a, c, g, or t
  misc_feature (1313)..(1313): n is a, c, g, or t
  misc_feature (1317)..(1317): n is a, c, g, or t
  misc_feature (1323)..(1323): n is a, c, g, or t
  misc_feature (1325)..(1326): n is a, c, g, or t
  misc_feature (1330)..(1330): n is a, c, g, or t
  misc_feature (1345)..(1345): n is a, c, g, or t
  misc_feature (1349)..(1350): n is a, c, g, or t
  misc_feature (1357)..(1357): n is a, c, g, or t
  misc_feature (1361)..(1361): n is a, c, g, or t
  misc_feature (1369)..(1369): n is a, c, g, or t
  misc_feature (1372)..(1372): n is a, c, g, or t
  misc_feature (1386)..(1386): n is a, c, g, or t
  misc_feature (1390)..(1390): n is a, c, g, or t
anaattagagagaattactatgagaggatcgcatcaccatcaccatcacggatcctatttaggtgacactatagaatcgtcgacccacgcgtccggccgggagttggagcctgcggagttcgagaccatgctgctgttctgccccggctgcgggaacgggctgatcgtggaggagggacaacgctgccaccgcttcgcctgcaacacgtgcccctacgtgcacaacatcacccgcaaggtaacaaatcggaagtacccaaaactgaaagaagtggatgatgtgcttggtggagcagctgcctgggagaatgttgactctactgcagagtcgtgtcccaaatgcgaacatcctcgtgcttacttcatgcagcttcagacccgctctgcagatgagccgatgaccaccttctacaagtgctgaaatgctcagtgtggacaccgctggagggattagggccaggatggcccagctgccctagtgtgtgcttgccttgtccctcggggtagatgcttagctggcagtatgagttgtgtgtcctgagggtctttgctagtgtggtggaaagataaaccttttgaggtgaagagccagggggtcaggaaatatggcctatctgccaggcagggtggatgaagtcatgaatgtctgggagtttttctgtgtggggaggagacagagacccataactaaatatgctctgtgtaaagtcctattctttcatcttccactttattggcagttgacattcccttactcccaatcaacactcttaaatatttgtactgtttgtaaaacttagtacatgtccctaaatatttaactgttacttgtaaacttgtgtaatttattatttatttttaaatcccnnnaaaaaaaaannaaannaaatnaanaaactnnananaaaatangggncgncccccncccnnaaagggngtcnnannnaacnttaattaaccnnaancttggancccttgttgaanaantccanttaatganccnccaaaanncctnnnggaatttttttcaaaaccnnccttnttcccccgggggtttttttnttggggaaaaattcnaacctancttngcgaaattttncnggagcttnggnagnctaaatngnanaaaaaaanncctggaantaccccccnttaatanttcccaangngannctaaaaaaaanttttggggnttttncnnnangttcccaaggnaccaaaancaaanccntcccncngnatnnaanngcccttttaaaanccncaanaaaaaaaccnccttttttnggccttttttanattttncccccctnaaangccccncnnattnttttgaaaaaaaagnaacnngaaaaanaagntccccttnaancctttacaaaaaanaaan

SEQ ID NO: 392 - DNA, 1545 bp, Homo Sapiens
  misc_feature (91)..(91): n is a, c, g, or t
  misc_feature (105)..(105): n is a, c, g, or t
  misc_feature (319)..(319): n is a, c, g, or t
  misc_feature (449)..(449): n is a, c, g, or t
  misc_feature (460)..(460): n is a, c, g, or t
  misc_feature (470)..(470): n is a, c, g, or t
  misc_feature (481)..(481): n is a, c, g, or t
  misc_feature (505)..(505): n is a, c, g, or t
  misc_feature (511)..(511): n is a, c, g, or t
  misc_feature (516)..(516): n is a, c, g, or t
  misc_feature (518)..(518): n is a, c, g, or t
  misc_feature (527)..(528): n is a, c, g, or t
  misc_feature (536)..(536): n is a, c, g, or t
  misc_feature (539)..(539): n is a, c, g, or t
  misc_feature (545)..(545): n is a, c, g, or t
  misc_feature (549)..(549): n is a, c, g, or t
  misc_feature (556)..(556): n is a, c, g, or t
  misc_feature (577)..(578): n is a, c, g, or t
  misc_feature (582)..(582): n is a, c, g, or t
  misc_feature (586)..(586): n is a, c, g, or t
  misc_feature (593)..(593): n is a, c, g, or t
  misc_feature (606)..(606): n is a, c, g, or t
  misc_feature (608)..(608): n is a, c, g, or t
  misc_feature (611)..(611): n is a, c, g, or t
  misc_feature (613)..(613): n is a, c, g, or t
  misc_feature (621)..(622): n is a, c, g, or t
  misc_feature (625)..(625): n is a, c, g, or t
  misc_feature (636)..(636): n is a, c, g, or t
  misc_feature (638)..(640): n is a, c, g, or t
  misc_feature (646)..(647): n is a, c, g, or t
  misc_feature (652)..(652): n is a, c, g, or t
  misc_feature (654)..(654): n is a, c, g, or t
  misc_feature (660)..(660): n is a, c, g, or t
  misc_feature (662)..(662): n is a, c, g, or t
  misc_feature (668)..(668): n is a, c, g, or t
  misc_feature (672)..(672): n is a, c, g, or t
  misc_feature (680)..(681): n is a, c, g, or t
  misc_feature (683)..(684): n is a, c, g, or t
  misc_feature (686)..(686): n is a, c, g, or t
  misc_feature (691)..(691): n is a, c, g, or t
  misc_feature (695)..(695): n is a, c, g, or t
  misc_feature (700)..(700): n is a, c, g, or t
  misc_feature (703)..(705): n is a, c, g, or t
  misc_feature (707)..(707): n is a, c, g, or t
  misc_feature (710)..(710): n is a, c, g, or t
  misc_feature (714)..(714): n is a, c, g, or t
  misc_feature (718)..(718): n is a, c, g, or t
  misc_feature (725)..(726): n is a, c, g, or t
  misc_feature (728)..(728): n is a, c, g, or t
  misc_feature (731)..(731): n is a, c, g, or t
  misc_feature (735)..(735): n is a, c, g, or t
  misc_feature (739)..(739): n is a, c, g, or t
  misc_feature (747)..(747): n is a, c, g, or t
  misc_feature (749)..(749): n is a, c, g, or t
  misc_feature (751)..(751): n is a, c, g, or t
  misc_feature (756)..(756): n is a, c, g, or t
  misc_feature (758)..(758): n is a, c, g, or t
  misc_feature (761)..(761): n is a, c, g, or t
  misc_feature (765)..(765): n is a, c, g, or t
  misc_feature (767)..(767): n is a, c, g, or t
  misc_feature (769)..(769): n is a, c, g, or t
  misc_feature (772)..(773): n is a, c, g, or t
  misc_feature (779)..(779): n is a, c, g, or t
  misc_feature (781)..(781): n is a, c, g, or t
  misc_feature (783)..(783): n is a, c, g, or t
  misc_feature (785)..(786): n is a, c, g, or t
  misc_feature (791)..(791): n is a, c, g, or t
  misc_feature (793)..(794): n is a, c, g, or t
  misc_feature (796)..(797): n is a, c, g, or t
  misc_feature (799)..(800): n is a, c, g, or t
  misc_feature (814)..(815): n is a, c, g, or t
  misc_feature (818)..(819): n is a, c, g, or t
  misc_feature (825)..(825): n is a, c, g, or t
  misc_feature (829)..(829): n is a, c, g, or t
  misc_feature (832)..(832): n is a, c, g, or t
  misc_feature (837)..(837): n is a, c, g, or t
  misc_feature (842)..(842): n is a, c, g, or t
  misc_feature (844)..(844): n is a, c, g, or t
  misc_feature (850)..(850): n is a, c, g, or t
  misc_feature (852)..(852): n is a, c, g, or t
  misc_feature (863)..(863): n is a, c, g, or t
  misc_feature (866)..(866): n is a, c, g, or t
  misc_feature (869)..(869): n is a, c, g, or t
  misc_feature (871)..(871): n is a, c, g, or t
  misc_feature (873)..(874): n is a, c, g, or t
  misc_feature (880)..(882): n is a, c, g, or t
  misc_feature (886)..(886): n is a, c, g, or t
  misc_feature (888)..(888): n is a, c, g, or t
  misc_feature (890)..(891): n is a, c, g, or t
  misc_feature (894)..(895): n is a, c, g, or t
  misc_feature (898)..(898): n is a, c, g, or t
  misc_feature (906)..(906): n is a, c, g, or t
  misc_feature (913)..(913): n is a, c, g, or t
  misc_feature (915)..(915): n is a, c, g, or t
  misc_feature (918)..(918): n is a, c, g, or t
  misc_feature (921)..(922): n is a, c, g, or t
  misc_feature (925)..(925): n is a, c, g, or t
  misc_feature (929)..(930): n is a, c, g, or t
  misc_feature (933)..(934): n is a, c, g, or t
  misc_feature (936)..(936): n is a, c, g, or t
  misc_feature (938)..(940): n is a, c, g, or t
  misc_feature (943)..(943): n is a, c, g, or t
  misc_feature (950)..(950): n is a, c, g, or t
  misc_feature (954)..(954): n is a, c, g, or t
  misc_feature (963)..(963): n is a, c, g, or t
  misc_feature (968)..(969): n is a, c, g, or t
  misc_feature (971)..(973): n is a, c, g, or t
  misc_feature (975)..(975): n is a, c, g, or t
  misc_feature (983)..(984): n is a, c, g, or t
  misc_feature (986)..(987): n is a, c, g, or t
  misc_feature (993)..(993): n is a, c, g, or t
  misc_feature (998)..(1000): n is a, c, g, or t
  misc_feature (1004)..(1004): n is a, c, g, or t
  misc_feature (1008)..(1008): n is a, c, g, or t
  misc_feature (1012)..(1012): n is a, c, g, or t
  misc_feature (1014)..(1014): n is a, c, g, or t
  misc_feature (1022)..(1022): n is a, c, g, or t
  misc_feature (1024)..(1024): n is a, c, g, or t
  misc_feature (1036)..(1036): n is a, c, g, or t
  misc_feature (1039)..(1041): n is a, c, g, or t
  misc_feature (1045)..(1045): n is a, c, g, or t
  misc_feature (1048)..(1050): n is a, c, g, or t
  misc_feature (1053)..(1053): n is a, c, g, or t
  misc_feature (1059)..(1059): n is a, c, g, or t
  misc_feature (1062)..(1062): n is a, c, g, or t
  misc_feature (1071)..(1071): n is a, c, g, or t
  misc_feature (1077)..(1077): n is a, c, g, or t
  misc_feature (1079)..(1081): n is a, c, g, or t
  misc_feature (1083)..(1083): n is a, c, g, or t
  misc_feature (1086)..(1089): n is a, c, g, or t
  misc_feature (1094)..(1097): n is a, c, g, or t
  misc_feature (1099)..(1100): n is a, c, g, or t
  misc_feature (1102)..(1102): n is a, c, g, or t
  misc_feature (1106)..(1106): n is a, c, g, or t
  misc_feature (1110)..(1110): n is a, c, g, or t
  misc_feature (1122)..(1123): n is a, c, g, or t
  misc_feature (1135)..(1135): n is a, c, g, or t
  misc_feature (1140)..(1140): n is a, c, g, or t
  misc_feature (1147)..(1147): n is a, c, g, or t
  misc_feature (1150)..(1150): n is a, c, g, or t
  misc_feature (1153)..(1154): n is a, c, g, or t
  misc_feature (1158)..(1158): n is a, c, g, or t
  misc_feature (1161)..(1161): n is a, c, g, or t
  misc_feature (1164)..(1165): n is a, c, g, or t
  misc_feature (1169)..(1170): n is a, c, g, or t
  misc_feature (1172)..(1172): n is a, c, g, or t
  misc_feature (1179)..(1179): n is a, c, g, or t
  misc_feature (1184)..(1184): n is a, c, g, or t
  misc_feature (1186)..(1186): n is a, c, g, or t
  misc_feature (1188)..(1188): n is a, c, g, or t
  misc_feature (1190)..(1190): n is a, c, g, or t
  misc_feature (1195)..(1197): n is a, c, g, or t
  misc_feature (1199)..(1199): n is a, c, g, or t
  misc_feature (1201)..(1201): n is a, c, g, or t
  misc_feature (1208)..(1208): n is a, c, g, or t
  misc_feature (1215)..(1215): n is a, c, g, or t
  misc_feature (1221)..(1221): n is a, c, g, or t
  misc_feature (1227)..(1227): n is a, c, g, or t
  misc_feature (1229)..(1230): n is a, c, g, or t
  misc_feature (1232)..(1232): n is a, c, g, or t
  misc_feature (1235)..(1235): n is a, c, g, or t
  misc_feature (1244)..(1244): n is a, c, g, or t
  misc_feature (1246)..(1246): n is a, c, g, or t
  misc_feature (1248)..(1248): n is a, c, g, or t
  misc_feature (1255)..(1255): n is a, c, g, or t
  misc_feature (1257)..(1257): n is a, c, g, or t
  misc_feature (1259)..(1260): n is a, c, g, or t
  misc_feature (1265)..(1265): n is a, c, g, or t
  misc_feature (1268)..(1268): n is a, c, g, or t
  misc_feature (1280)..(1280): n is a, c, g, or t
  misc_feature (1284)..(1284): n is a, c, g, or t
  misc_feature (1288)..(1288): n is a, c, g, or t
  misc_feature (1294)..(1294): n is a, c, g, or t
  misc_feature (1304)..(1304): n is a, c, g, or t
  misc_feature (1308)..(1308): n is a, c, g, or t
  misc_feature (1310)..(1310): n is a, c, g, or t
  misc_feature (1323)..(1323): n is a, c, g, or t
  misc_feature (1338)..(1338): n is a, c, g, or t
  misc_feature (1345)..(1345): n is a, c, g, or t
  misc_feature (1354)..(1354): n is a, c, g, or t
  misc_feature (1358)..(1359): n is a, c, g, or t
  misc_feature (1361)..(1361): n is a, c, g, or t
  misc_feature (1364)..(1364): n is a, c, g, or t
  misc_feature (1367)..(1367): n is a, c, g, or t
  misc_feature (1369)..(1369): n is a, c, g, or t
  misc_feature (1372)..(1372): n is a, c, g, or t
  misc_feature (1374)..(1374): n is a, c, g, or t
  misc_feature (1381)..(1383): n is a, c, g, or t
  misc_feature (1385)..(1385): n is a, c, g, or t
  misc_feature (1387)..(1387): n is a, c, g, or t
  misc_feature (1389)..(1390): n is a, c, g, or t
  misc_feature (1392)..(1392): n is a, c, g, or t
  misc_feature (1394)..(1394): n is a, c, g, or t
  misc_feature (1396)..(1397): n is a, c, g, or t
  misc_feature (1400)..(1400): n is a, c, g, or t
  misc_feature (1405)..(1405): n is a, c, g, or t
  misc_feature (1409)..(1410): n is a, c, g, or t
  misc_feature (1412)..(1413): n is a, c, g, or t
  misc_feature (1417)..(1418): n is a, c, g, or t
  misc_feature (1421)..(1421): n is a, c, g, or t
  misc_feature (1424)..(1424): n is a, c, g, or t
  misc_feature (1430)..(1430): n is a, c, g, or t
  misc_feature (1438)..(1438): n is a, c, g, or t
  misc_feature (1446)..(1446): n is a, c, g, or t
  misc_feature (1456)..(1457): n is a, c, g, or t
  misc_feature (1464)..(1464): n is a, c, g, or t
  misc_feature (1466)..(1467): n is a, c, g, or t
  misc_feature (1476)..(1477): n is a, c, g, or t
  misc_feature (1482)..(1482): n is a, c, g, or t
  misc_feature (1486)..(1487): n is a, c, g, or t
  misc_feature (1493)..(1493): n is a, c, g, or t
  misc_feature (1497)..(1497): n is a, c, g, or t
  misc_feature (1500)..(1501): n is a, c, g, or t
  misc_feature (1503)..(1503): n is a, c, g, or t
  misc_feature (1509)..(1509): n is a, c, g, or t
  misc_feature (1520)..(1520): n is a, c, g, or t
  misc_feature (1527)..(1527): n is a, c, g, or t
  misc_feature (1539)..(1539): n is a, c, g, or t
  misc_feature (1545)..(1545): n is a, c, g, or t
gaatagagagaattactatgagaggatcgcatcaccatcaccatcacgggatcctatttaggtgacactatagaatcgtcgacccacgcgntccgcccacgcgtncgagcagaggctgcaactggaccgcgcacgacaggacctgccctctagcctcgtgggtctgttccccagggcccagggccctgcagcctccagccagagtgccctcatgcctcctgctcccaccacccgttggtgcagccagccgccaactggcctggaccccagccccttgcacctccatgccaggctggcactgctgaggcacatggcagancaggaccgtgacttcttggagaatgaacagttcttcctggagaccctgaagaaagggtcctacaatttgacatctcattcagcctgagtgggaccccagccgattccccaacagaaggttcggaccccanaactgtcctgnttcctccggntgcctccatgnaggcagtgcctggggaggattctnacatgnttgangnctgatgaannctcttccntgnacaggntgcnagtgcancctttccaaatgtgccagccnngggnatcncctgccntctggggctcatnangangnaagctatnntanccatgttattngnnntgaccnngcccnanaagaananatgagnttgnatcatganngnnantgaanttgnaaagnaannnanccnccanctcntcattgnngnacngatngtcnttcccccngnancactntnggngatncncnacnngtatcnanangnnaaaantnnanntnngaattctttttttnnttnngacttntttnatnaggangtaantnttttcntngagtgtattcnatnaantntnntatccnnnatcncntnnaannaancatctttnactcccnanaanatnnttntaannaanncncnnnctngaactcntaanatacaaaangatgnnannnanccataaanncnnactttnataannnaaanatantttntntaacttcnantagagtcaatanatnnntatngannnttnaccaanatnaaaaaattnttattnannnanaannnnctaannnnannanttcntttngtcataacaatnnataaacatcagntttcntacatcnaanagnntacnatnctnnatcnncncaaaaantcttnantncntttannnantnagcaatntatcatnacatanaattcntnntnaantatatactntnanaataacncntnnaatanganattcgaatgaanacantttnaattantagaatatcnttananttatactaatatntaatcaatatcatantatgtanctatgattntgannantcntcngnctnanattacannnantntnncntntnnatnacatnatgnngnnctcnntantanttcacntaatacancaactatnattcttcacnnctaatantnnacatatctnnatcanaacnnattacnaaantcnntntttacnttcttatctantacaacntctctattaatnagtatn

SEQ ID NO: 393 - DNA, 1409 bp, Homo Sapiens
  misc_feature (837)..(837): n is a, c, g, or t
  misc_feature (904)..(904): n is a, c, g, or t
  misc_feature (907)..(907): n is a, c, g, or t
  misc_feature (937)..(937): n is a, c, g, or t
  misc_feature (941)..(941): n is a, c, g, or t
  misc_feature (954)..(954): n is a, c, g, or t
  misc_feature (961)..(962): n is a, c, g, or t
  misc_feature (964)..(964): n is a, c, g, or t
  misc_feature (981)..(981): n is a, c, g, or t
  misc_feature (989)..(990): n is a, c, g, or t
  misc_feature (1001)..(1002): n is a, c, g, or t
  misc_feature (1006)..(1006): n is a, c, g, or t
  misc_feature (1009)..(1009): n is a, c, g, or t
  misc_feature (1016)..(1016): n is a, c, g, or t
  misc_feature (1018)..(1019): n is a, c, g, or t
  misc_feature (1024)..(1024): n is a, c, g, or t
  misc_feature (1029)..(1029): n is a, c, g, or t
  misc_feature (1034)..(1034): n is a, c, g, or t
  misc_feature (1040)..(1040): n is a, c, g, or t
  misc_feature (1043)..(1043): n is a, c, g, or t
  misc_feature (1049)..(1049): n is a, c, g, or t
  misc_feature (1059)..(1059): n is a, c, g, or t
  misc_feature (1076)..(1076): n is a, c, g, or t
  misc_feature (1089)..(1089): n is a, c, g, or t
  misc_feature (1093)..(1093): n is a, c, g, or t
  misc_feature (1101)..(1102): n is a, c, g, or t
  misc_feature (1114)..(1114): n is a, c, g, or t
  misc_feature (1120)..(1120): n is a, c, g, or t
  misc_feature (1128)..(1128): n is a, c, g, or t
  misc_feature (1136)..(1136): n is a, c, g, or t
  misc_feature (1139)..(1139): n is a, c, g, or t
  misc_feature (1142)..(1142): n is a, c, g, or t
  misc_feature (1151)..(1151): n is a, c, g, or t
  misc_feature (1153)..(1153): n is a, c, g, or t
  misc_feature (1157)..(1159): n is a, c, g, or t
  misc_feature (1163)..(1166): n is a, c, g, or t
  misc_feature (1169)..(1169): n is a, c, g, or t
  misc_feature (1182)..(1183): n is a, c, g, or t
  misc_feature (1190)..(1190): n is a, c, g, or t
  misc_feature (1194)..(1194): n is a, c, g, or t
  misc_feature (1198)..(1199): n is a, c, g, or t
  misc_feature (1218)..(1218): n is a, c, g, or t
  misc_feature (1220)..(1220): n is a, c, g, or t
  misc_feature (1225)..(1225): n is a, c, g, or t
  misc_feature (1227)..(1227): n is a, c, g, or t
  misc_feature (1232)..(1232): n is a, c, g, or t
  misc_feature (1245)..(1245): n is a, c, g, or t
  misc_feature (1250)..(1250): n is a, c, g, or t
  misc_feature (1254)..(1254): n is a, c, g, or t
  misc_feature (1260)..(1260): n is a, c, g, or t
  misc_feature (1270)..(1270): n is a, c, g, or t
  misc_feature (1281)..(1281): n is a, c, g, or t
  misc_feature (1285)..(1285): n is a, c, g, or t
  misc_feature (1291)..(1291): n is a, c, g, or t
  misc_feature (1297)..(1298): n is a, c, g, or t
  misc_feature (1307)..(1307): n is a, c, g, or t
  misc_feature (1313)..(1314): n is a, c, g, or t
  misc_feature (1326)..(1326): n is a, c, g, or t
  misc_feature (1330)..(1330): n is a, c, g, or t
  misc_feature (1337)..(1337): n is a, c, g, or t
  misc_feature (1341)..(1341): n is a, c, g, or t
  misc_feature (1344)..(1345): n is a, c, g, or t
  misc_feature (1350)..(1351): n is a, c, g, or t
  misc_feature (1353)..(1354): n is a, c, g, or t
  misc_feature (1360)..(1360): n is a, c, g, or t
  misc_feature (1382)..(1383): n is a, c, g, or t
  misc_feature (1385)..(1386): n is a, c, g, or t
  misc_feature (1388)..(1388): n is a, c, g, or t
  misc_feature (1393)..(1393): n is a, c, g, or t
  misc_feature (1396)..(1396): n is a, c, g, or t
  misc_feature (1401)..(1401): n is a, c, g, or t
  misc_feature (1403)..(1404): n is a, c, g, or t
  misc_feature (1408)..(1408): n is a, c, g, or t
attagagaaattactatgagaggatcgcatcaccatcaccatcacggatcctatttaggtgacactatagaatcgtcgacccacgcgtccggcatccacgggcgccgagcctccgtccgtgtctctatccctcccgggcctttgtcagcgcgcccgctgggagcggggccgagagcgccggttccagtcagacagccccgcaggtcagcggccgggccgagggcgccagagggggccatgtcgtaccagggcaagaagagcatcccgcacatcacgagtgaccgactcctcatcaaaggtggacggatcatcaacgatgaccaatccctttatgctgacgtctacctggaggatggacttatcaaacaaataggagagaacttaatcgttcctggtggagtgaagaccattgaagccaacgggcggatggttattcccggaggtattgatgtcaacacgtacctgcagaagccctcccaggggatgactgcggctgatgacttcttccaagggaccagggcggcactggtgggcgggaccacgatgatcattgaccatgttgttcctgaacctgggtccagcctactgacctctttcgagaagtggcacgaagcagctgacaccaaatcctgctgtgattactccctccacgtggacatcacaagctggtacgatggcgttcgggaggagctggaggtgctggtgcaggacaaaggcgtcaattccttccaagtctacatggcctataaggatgtctaccaaatgtccgacagccagctctatgaaagcctttaccttccttaagggcctggggagctgtgatcttggtccatgcanaaaaatggagatttgatagctcaggaacaaaaagcggatcctggaagatggggcatcacgggttccngangggccatgccctgaagcaaacctgaaaaanctgnaggcccgaggcgntgtttcnngnccatcaccattgcgggnccggaatnnactgcccttgnntaantcnccaaggntnntgagnaaaantgaanccgaanttnattccnttttggccangaaaaaaaggcccctanttttttgaaaaancccnttgccccnnccctggggaacnattgcncccccctnattgaacnaanaantgggccaangntgcnnngttnnnnaanttcccctcccctnnacccggnactnaaannccgaaaaattaacttcccnanggccngngggantttggagttaaanaatgngctnttttcntaaaaacttnccaaaaggggngganaaaaantttacnnttccccagngttctnngaataaaaaaanaatncctttcngaanatnngggtnntnnaaaaanaaaacacattttcttccccctnntnncnaaatnttntttcnannaggnt

SEQ ID NO: 394 - DNA, 1439 bp, Homo Sapiens
  misc_feature (4)..(4): n is a, c, g, or t
  misc_feature (507)..(507): n is a, c, g, or t
  misc_feature (654)..(654): n is a, c, g, or t
  misc_feature (709)..(709): n is a, c, g, or t
  misc_feature (729)..(729): n is a, c, g, or t
  misc_feature (769)..(769): n is a, c, g, or t
  misc_feature (772)..(772): n is a, c, g, or t
  misc_feature (806)..(806): n is a, c, g, or t
  misc_feature (812)..(812): n is a, c, g, or t
  misc_feature (834)..(834): n is a, c, g, or t
  misc_feature (890)..(890): n is a, c, g, or t
  misc_feature (894)..(894): n is a, c, g, or t
  misc_feature (904)..(904): n is a, c, g, or t
  misc_feature (950)..(950): n is a, c, g, or t
  misc_feature (960)..(960): n is a, c, g, or t
  misc_feature (962)..(962): n is a, c, g, or t
  misc_feature (965)..(965): n is a, c, g, or t
  misc_feature (980)..(980): n is a, c, g, or t
  misc_feature (989)..(989): n is a, c, g, or t
  misc_feature (1000)..(1000): n is a, c, g, or t
  misc_feature (1023)..(1023): n is a, c, g, or t
  misc_feature (1025)..(1025): n is a, c, g, or t
  misc_feature (1058)..(1058): n is a, c, g, or t
  misc_feature (1061)..(1061): n is a, c, g, or t
  misc_feature (1092)..(1092): n is a, c, g, or t
  misc_feature (1110)..(1110): n is a, c, g, or t
  misc_feature (1118)..(1118): n is a, c, g, or t
  misc_feature (1128)..(1128): n is a, c, g, or t
  misc_feature (1130)..(1132): n is a, c, g, or t
  misc_feature (1137)..(1137): n is a, c, g, or t
  misc_feature (1153)..(1153): n is a, c, g, or t
  misc_feature (1164)..(1164): n is a, c, g, or t
  misc_feature (1184)..(1184): n is a, c, g, or t
  misc_feature (1187)..(1187): n is a, c, g, or t
  misc_feature (1194)..(1194): n is a, c, g, or t
  misc_feature (1199)..(1200): n is a, c, g, or t
  misc_feature (1209)..(1210): n is a, c, g, or t
  misc_feature (1219)..(1219): n is a, c, g, or t
  misc_feature (1221)..(1221): n is a, c, g, or t
  misc_feature (1223)..(1224): n is a, c, g, or t
  misc_feature (1231)..(1231): n is a, c, g, or t
  misc_feature (1233)..(1234): n is a, c, g, or t
  misc_feature (1236)..(1236): n is a, c, g, or t
  misc_feature (1239)..(1239): n is a, c, g, or t
  misc_feature (1241)..(1242): n is a, c, g, or t
  misc_feature (1244)..(1244): n is a, c, g, or t
  misc_feature (1251)..(1251): n is a, c, g, or t
  misc_feature (1254)..(1254): n is a, c, g, or t
  misc_feature (1259)..(1259): n is a, c, g, or t
  misc_feature (1261)..(1262): n is a, c, g, or t
  misc_feature (1264)..(1264): n is a, c, g, or t
  misc_feature (1269)..(1269): n is a, c, g, or t
  misc_feature (1276)..(1277): n is a, c, g, or t
  misc_feature (1279)..(1279): n is a, c, g, or t
  misc_feature (1281)..(1281): n is a, c, g, or t
  misc_feature (1287)..(1287): n is a, c, g, or t
  misc_feature (1303)..(1303): n is a, c, g, or t
  misc_feature (1314)..(1314): n is a, c, g, or t
  misc_feature (1329)..(1329): n is a, c, g, or t
  misc_feature (1336)..(1336): n is a, c, g, or t
  misc_feature (1339)..(1339): n is a, c, g, or t
  misc_feature (1341)..(1341): n is a, c, g, or t
  misc_feature (1345)..(1345): n is a, c, g, or t
  misc_feature (1355)..(1355): n is a, c, g, or t
  misc_feature (1361)..(1361): n is a, c, g, or t
  misc_feature (1366)..(1366): n is a, c, g, or t
  misc_feature (1372)..(1372): n is a, c, g, or t
  misc_feature (1380)..(1381): n is a, c, g, or t
  misc_feature (1389)..(1389): n is a, c, g, or t
  misc_feature (1401)..(1401): n is a, c, g, or t
  misc_feature (1406)..(1406): n is a, c, g, or t
  misc_feature (1409)..(1409): n is a, c, g, or t
  misc_feature (1414)..(1414): n is a, c, g, or t
  misc_feature (1418)..(1418): n is a, c, g, or t
  misc_feature (1428)..(1428): n is a, c, g, or t
  misc_feature (1430)..(1432): n is a, c, g, or t
  misc_feature (1436)..(1436): n is a, c, g, or t
  misc_feature (1438)..(1438): n is a, c, g, or t
aaantagagagaattaactatgagaggatcgcatcaccattcaccattcacgggatcctatttaggtgacactatagaatcgtcgacccacgcgtccggattatccggagccaaggatccgctcgggtgagtgccctccgctttttgtggccaaacccagccacgcagtcccctccctgcggcgtcctccacacccggggtctgctggtctccgcggatgtcacaggctcggcaaccgccctcctgtcggcggggagtcccgcgacgcccggaaatgctccgaagcctgtcgctcagctgccagatctgcgtctgtgtccggttccgtcactgaggtcgcccctgtccggcccttcctccctagttctcttcaccgtccgcccatcctgtcgcgcgccgcgtcaggtccccattcggcatgtggcttgtcttccatcgtccccaccctcgcccctcttggcccctcagggcagccctgggattcggcagacgccagtcctccctganatgcttccccgtccttccctccgccaggccctacgtctccgcaaaccccacgcttcggggtggccgcctcagacaggaccctgagtccgagactggggtaggggacctgcccgatcctgtaacaaccctcgtgcttctgcacaatcncctcccactagcggtgactgttgggtgtctaccttcccggtgtcccactgagaancgggctcttccttggcaggngcttcttcattgcctcgctgtggatgtcgaggtggggcanganagtgaggagaaaaacagagaggagggaggtaganccaacnagcgagaaaaaggggaaggaanttttaaatgggaagtggatgggtctgaggaatttgaacaaacaccgacagtgaagnagantgacctgaancaagcagtaatggggtaaatggaaatagaacaaaatggggaatcancaaaaatatngnagnaaaaaatacaatgangaaggcttngaaccgtcatnaacaaaaaagggcaaccaaaaancntaattcccaaaattccttaaaatggttttcttnaantcaaaataaatttcccttttaaaattatttnttcaaggttcaacttaanaaggcttnaaaatttttnannnttaantaaaattggaaaaaantttttttttanaaaaggcttttaaaataaantcngggggcncttcnnaaggaaaannaaaatttgntnannttaaaantnnanacntnncncaattcnttnaaaananncnggaanaaaaaanngngnaaaaanttcaaaaaaaaaaaanaaatttttttnaatttttcaaaaaanaaagaancgnanttcnaaaatttttnaaaaanaatgntttaanaaaaattnnaaaaattnaaaaaaaaaggnccctnaanggganaaanaaaaaaaagncnnnaaanana

SEQ ID NO: 395 - DNA, 1393 bp, Homo Sapiens
  misc_feature (1)..(1): n is a, c, g, or t
  misc_feature (15)..(15): n is a, c, g, or t
  misc_feature (828)..(828): n is a, c, g, or t
  misc_feature (908)..(908): n is a, c, g, or t
  misc_feature (927)..(927): n is a, c, g, or t
  misc_feature (942)..(942): n is a, c, g, or t
  misc_feature (986)..(986): n is a, c, g, or t
  misc_feature (1013)..(1013): n is a, c, g, or t
  misc_feature (1016)..(1016): n is a, c, g, or t
  misc_feature (1041)..(1041): n is a, c, g, or t
  misc_feature (1052)..(1052): n is a, c, g, or t
  misc_feature (1057)..(1058): n is a, c, g, or t
  misc_feature (1061)..(1061): n is a, c, g, or t
  misc_feature (1065)..(1065): n is a, c, g, or t
  misc_feature (1073)..(1073): n is a, c, g, or t
  misc_feature (1078)..(1078): n is a, c, g, or t
  misc_feature (1088)..(1088): n is a, c, g, or t
  misc_feature (1097)..(1097): n is a, c, g, or t
  misc_feature (1109)..(1110): n is a, c, g, or t
  misc_feature (1126)..(1126): n is a, c, g, or t
  misc_feature (1128)..(1129): n is a, c, g, or t
  misc_feature (1135)..(1135): n is a, c, g, or t
  misc_feature (1140)..(1140): n is a, c, g, or t
  misc_feature (1151)..(1151): n is a, c, g, or t
  misc_feature (1155)..(1156): n is a, c, g, or t
  misc_feature (1164)..(1164): n is a, c, g, or t
  misc_feature (1166)..(1166): n is a, c, g, or t
  misc_feature (1174)..(1174): n is a, c, g, or t
  misc_feature (1185)..(1185): n is a, c, g, or t
  misc_feature (1190)..(1190): n is a, c, g, or t
  misc_feature (1193)..(1193): n is a, c, g, or t
  misc_feature (1200)..(1200): n is a, c, g, or t
  misc_feature (1209)..(1209): n is a, c, g, or t
  misc_feature (1213)..(1214): n is a, c, g, or t
  misc_feature (1220)..(1220): n is a, c, g, or t
  misc_feature (1240)..(1240): n is a, c, g, or t
  misc_feature (1249)..(1249): n is a, c, g, or t
  misc_feature (1255)..(1255): n is a, c, g, or t
  misc_feature (1259)..(1259): n is a, c, g, or t
  misc_feature (1284)..(1284): n is a, c, g, or t
  misc_feature (1286)..(1286): n is a, c, g, or t
  misc_feature (1288)..(1288): n is a, c, g, or t
  misc_feature (1310)..(1310): n is a, c, g, or t
  misc_feature (1312)..(1312): n is a, c, g, or t
  misc_feature (1320)..(1320): n is a, c, g, or t
  misc_feature (1323)..(1323): n is a, c, g, or t
  misc_feature (1325)..(1325): n is a, c, g, or t
  misc_feature (1333)..(1336): n is a, c, g, or t
  misc_feature (1338)..(1339): n is a, c, g, or t
  misc_feature (1344)..(1345): n is a, c, g, or t
  misc_feature (1347)..(1347): n is a, c, g, or t
  misc_feature (1356)..(1357): n is a, c, g, or t
  misc_feature (1362)..(1362): n is a, c, g, or t
  misc_feature (1367)..(1367): n is a, c, g, or t
  misc_feature (1370)..(1370): n is a, c, g, or t
  misc_feature (1375)..(1375): n is a, c, g, or t
  misc_feature (1380)..(1381): n is a, c, g, or t
  misc_feature (1385)..(1385): n is a, c, g, or t
  misc_feature (1388)..(1388): n is a, c, g, or t
naatagagagattanctatgagaggatcgcatcaccatcaccatcacggatcctatttaggtgacactatagaatcgtcgacccacgcgtccgggaatcgggctgattcatcgccggtttgcagactgagccgcgtcgggtgtgcgccgctgctgctgttgcctctgtcttcgcgtcaccacagaggcaagacaagggtccatatcgcggcatccggctcccgcccgtcttcaggagagaaagaaaaaataaaatatacttggggaagttgtacctgccagaattagcaagagctttctttaagaagacatttgtcaaactcaacaaattgaaggttaacaccttaagagttgtagttactgaccagaaatatggacagacttcttagacttggaggaggtatgcctggactgggccaggggccacctacagatgctcctgcagtggacacagcagaacaagtctatatctcttccctggcactgttaaaaatgttaaaacatggccgtgctggagttccaatggaagttatgggtttgatgcttggagaatttgttgatgattataccgtcagagtgattgatgtgtttgctatgccacagtcaggaacaggtgtcagtgtggaggcagttgatccagtgttccaagctaaaatgttggatatgttgaagcagacaggaaggccggagatggttgttggttggtatcacagtcaccctggctttggttgttggctttctggtgtggatatcaacactcagcagagctttgaagccttgtcggagagagctgtggcagtggttgtggatcccattcagagtgtaaaangaaaggttgttattgatgccttcagattgatcaatgctaatatgatggtcttaggacatgaaccaagacaaacaacttcnaatctgggtcacttaaacnagccatctatccagncattaattcatggactaaacagacattattactccattactatnaactatcggaaaaatgaactggaacanaanagttgctaatttgccataaaaaaantggatggaagnttgannctnccgnactacggngaacnttgtaacccnatgaatccntggtaaaaaaannttggaattacccaaantnnaaaaangctgnaaaaaaaaaanaaannaccctaancnctggcaanaaaaaagttgncaacnggnccccacncctttgganaaanngggganacttaaaacccaaatttccnggttaaccnttttgnaccncccttttaaaaccccaaacccttangngnccccgggaattcctgtgtccangncaaaaagnccntnagggtttnnnnannaaaanngncttttcccnnaaccnccccnggnaattnttttnnaggnttnaaaaa

SEQ ID NO: 396 - DNA, 1440 bp, Homo Sapiens
  misc_feature (1)..(1): n is a, c, g, or t
  misc_feature (111)..(111): n is a, c, g, or t
  misc_feature (683)..(683): n is a, c, g, or t
  misc_feature (720)..(720): n is a, c, g, or t
  misc_feature (739)..(739): n is a, c, g, or t
  misc_feature (741)..(741): n is a, c, g, or t
  misc_feature (762)..(762): n is a, c, g, or t
  misc_feature (791)..(792): n is a, c, g, or t
  misc_feature (829)..(829): n is a, c, g, or t
  misc_feature (833)..(833): n is a, c, g, or t
  misc_feature (840)..(840): n is a, c, g, or t
  misc_feature (856)..(856): n is a, c, g, or t
  misc_feature (864)..(864): n is a, c, g, or t
  misc_feature (880)..(880): n is a, c, g, or t
  misc_feature (882)..(882): n is a, c, g, or t
  misc_feature (897)..(897): n is a, c, g, or t
  misc_feature (899)..(899): n is a, c, g, or t
  misc_feature (906)..(906): n is a, c, g, or t
  misc_feature (920)..(920): n is a, c, g, or t
  misc_feature (930)..(930): n is a, c, g, or t
  misc_feature (932)..(932): n is a, c, g, or t
  misc_feature (937)..(937): n is a, c, g, or t
  misc_feature (962)..(963): n is a, c, g, or t
  misc_feature (981)..(981): n is a, c, g, or t
  misc_feature (984)..(985): n is a, c, g, or t
  misc_feature (1000)..(1000): n is a, c, g, or t
  misc_feature (1002)..(1002): n is a, c, g, or t
  misc_feature (1005)..(1005): n is a, c, g, or t
  misc_feature (1007)..(1007): n is a, c, g, or t
  misc_feature (1029)..(1029): n is a, c, g, or t
  misc_feature (1031)..(1032): n is a, c, g, or t
  misc_feature (1034)..(1035): n is a, c, g, or t
  misc_feature (1043)..(1043): n is a, c, g, or t
  misc_feature (1053)..(1053): n is a, c, g, or t
  misc_feature (1055)..(1055): n is a, c, g, or t
  misc_feature (1057)..(1057): n is a, c, g, or t
  misc_feature (1060)..(1064): n is a, c, g, or t
  misc_feature (1067)..(1067): n is a, c, g, or t
  misc_feature (1072)..(1072): n is a, c, g, or t
  misc_feature (1075)..(1076): n is a, c, g, or t
  misc_feature (1079)..(1080): n is a, c, g, or t
  misc_feature (1087)..(1087): n is a, c, g, or t
  misc_feature (1092)..(1092): n is a, c, g, or t
  misc_feature (1094)..(1094): n is a, c, g, or t
  misc_feature (1096)..(1097): n is a, c, g, or t
  misc_feature (1105)..(1105): n is a, c, g, or t
  misc_feature (1107)..(1107): n is a, c, g, or t
  misc_feature (1112)..(1112): n is a, c, g, or t
  misc_feature (1114)..(1114): n is a, c, g, or t
  misc_feature (1116)..(1116): n is a, c, g, or t
  misc_feature (1118)..(1119): n is a, c, g, or t
  misc_feature (1131)..(1131): n is a, c, g, or t
  misc_feature (1133)..(1134): n is a, c, g, or t
  misc_feature (1137)..(1137): n is a, c, g, or t
  misc_feature (1145)..(1145): n is a, c, g, or t
  misc_feature (1150)..(1150): n is a, c, g, or t
  misc_feature (1156)..(1156): n is a, c, g, or t
  misc_feature (1161)..(1161): n is a, c, g, or t
  misc_feature (1168)..(1168): n is a, c, g, or t
  misc_feature (1179)..(1179): n is a, c, g, or t
  misc_feature (1181)..(1182): n is a, c, g, or t
  misc_feature (1193)..(1193): n is a, c, g, or t
  misc_feature (1198)..(1201): n is a, c, g, or t
  misc_feature (1207)..(1207): n is a, c, g, or t
  misc_feature (1211)..(1211): n is a, c, g, or t
  misc_feature (1231)..(1231): n is a, c, g, or t
  misc_feature (1237)..(1237): n is a, c, g, or t
  misc_feature (1242)..(1243): n is a, c, g, or t
  misc_feature (1245)..(1245): n is a, c, g, or t
  misc_feature (1248)..(1249): n is a, c, g, or t
  misc_feature (1253)..(1255): n is a, c, g, or t
  misc_feature (1257)..(1257): n is a, c, g, or t
  misc_feature (1259)..(1259): n is a, c, g, or t
  misc_feature (1265)..(1265): n is a, c, g, or t
  misc_feature (1268)..(1268): n is a, c, g, or t
  misc_feature (1271)..(1271): n is a, c, g, or t
  misc_feature (1275)..(1276): n is a, c, g, or t
  misc_feature (1288)..(1288): n is a, c, g, or t
  misc_feature (1291)..(1291): n is a, c, g, or t
  misc_feature (1294)..(1294): n is a, c, g, or t
  misc_feature (1298)..(1299): n is a, c, g, or t
  misc_feature (1304)..(1305): n is a, c, g, or t
  misc_feature (1312)..(1314): n is a, c, g, or t
  misc_feature (1318)..(1319): n is a, c, g, or t
  misc_feature (1322)..(1322): n is a, c, g, or t
  misc_feature (1338)..(1338): n is a, c, g, or t
  misc_feature (1340)..(1340): n is a, c, g, or t
  misc_feature (1344)..(1344): n is a, c, g, or t
  misc_feature (1348)..(1348): n is a, c, g, or t
  misc_feature (1350)..(1351): n is a, c, g, or t
  misc_feature (1355)..(1355): n is a, c, g, or t
  misc_feature (1367)..(1367): n is a, c, g, or t
  misc_feature (1374)..(1374): n is a, c, g, or t
  misc_feature (1386)..(1386): n is a, c, g, or t
  misc_feature (1390)..(1390): n is a, c, g, or t
  misc_feature (1407)..(1407): n is a, c, g, or t
  misc_feature (1410)..(1411): n is a, c, g, or t
  misc_feature (1413)..(1413): n is a, c, g, or t
  misc_feature (1415)..(1416): n is a, c, g, or t
  misc_feature (1420)..(1420): n is a, c, g, or t
  misc_feature (1422)..(1423): n is a, c, g, or t
  misc_feature (1429)..(1429): n is a, c, g, or t
  misc_feature (1431)..(1434): n is a, c, g, or t
  misc_feature (1438)..(1438): n is a, c, g, or t
  misc_feature (1440)..(1440): n is a, c, g, or t
naaatagagagaattaactatgagaggatcgcatcaccatcaccatcacggatcctatttaggtgacactatagaatcgtcgacccacgcggtccggtcctccagaccagnctgcggtcccccacccgcctcccagcactcccatcaagctggaggaaggagacggatgcgctagagagtacctgttaccctaaccttgtgccggagccgactactggagatgacagtgatgctgccacctttaagccaactctccccgatctgtcccctgatgaaccttcagaagcactcggcttcccaatgttagagaaggaggaggaagcccatagacccccaagccccactgaggcccctactgaggccagccccgagccagccccagacccagccccggtggctgaagaggctgccccctcagctgtcgaggagggggccgccgcggaccctggcagcgatgggtctccaggcaagtccccgtccaaaaagaagaagaagttccgtaccccgtcctttctgaagaagagcaagaagaagagtgactcctgaaagccctgcgctaacactgtcctgtccggagcgaccctggctctgccagcgtccccggccacgtctgtgctctgtccttgtgtaatggaatgcaaaaaagccaagccctccgcctagaggtcccctcacgtgaccanccccgtgtagccccgggctgacccagtgtgtgctcancagccccaccccaccctgncncttgtcctctcaaagcctcancttctggggggagacatgctctccctcanngggggggaggcactaaattcatggtcctggctggaangtantgaaggntttctgcagctttggntgcacgtnaccttcctgaagcctnanccttttcctggccgntncctcctnttgtgaaatccccnaatttctgtntngcctnggcttcccctccaccctaaagtccnnaggtgaaggaaccaaacnctnntttctggtggcattntnctntnctcaagggtttctcacttaaantnntnnacaaatcnttggtcccgngnanaannnnnttntgtcntcnntcnnccttttnaaaangnannttttggtnantaatntngncnngaaaccccatantnnaantgggcttntgtgncccaanctggntttctanattttctaaancnntatccctttancaaannnnatttcnggtncttttttcttttttttttgntttctngtttnntntannaagnnnantngggggnaangcnttcnnatattttttatnagnttntaanntattnnttttttnnngganntanaacgctttttatcttntnttcnaacncnntaanattttttttttnggattgntggttttttctntttnccaaaactttttttttnatnnangnngagntnncctccnannnnttgntn

SEQ ID NO: 397 - DNA, 1523 bp, Homo Sapiens
  misc_feature (5)..(5): n is a, c, g, or t
  misc_feature (109)..(109): n is a, c, g, or t
  misc_feature (353)..(353): n is a, c, g, or t
  misc_feature (454)..(454): n is a, c, g, or t
  misc_feature (493)..(493): n is a, c, g, or t
  misc_feature (513)..(513): n is a, c, g, or t
  misc_feature (524)..(524): n is a, c, g, or t
  misc_feature (526)..(526): n is a, c, g, or t
  misc_feature (539)..(539): n is a, c, g, or t
  misc_feature (542)..(542): n is a, c, g, or t
  misc_feature (552)..(552): n is a, c, g, or t
  misc_feature (561)..(561): n is a, c, g, or t
  misc_feature (588)..(589): n is a, c, g, or t
  misc_feature (605)..(605): n is a, c, g, or t
  misc_feature (615)..(615): n is a, c, g, or t
  misc_feature (617)..(618): n is a, c, g, or t
  misc_feature (632)..(632): n is a, c, g, or t
  misc_feature (637)..(637): n is a, c, g, or t
  misc_feature (639)..(639): n is a, c, g, or t
  misc_feature (641)..(641): n is a, c, g, or t
  misc_feature (668)..(668): n is a, c, g, or t
  misc_feature (674)..(674): n is a, c, g, or t
  misc_feature (676)..(676): n is a, c, g, or t
  misc_feature (686)..(686): n is a, c, g, or t
  misc_feature (697)..(698): n is a, c, g, or t
  misc_feature (714)..(714): n is a, c, g, or t
  misc_feature (719)..(719): n is a, c, g, or t
  misc_feature (723)..(723): n is a, c, g, or t
  misc_feature (727)..(728): n is a, c, g, or t
  misc_feature (730)..(730): n is a, c, g, or t
  misc_feature (740)..(740): n is a, c, g, or t
  misc_feature (749)..(750): n is a, c, g, or t
  misc_feature (753)..(753): n is a, c, g, or t
  misc_feature (761)..(762): n is a, c, g, or t
  misc_feature (765)..(767): n is a, c, g, or t
  misc_feature (770)..(770): n is a, c, g, or t
  misc_feature (776)..(776): n is a, c, g, or t
  misc_feature (780)..(781): n is a, c, g, or t
  misc_feature (794)..(794): n is a, c, g, or t
  misc_feature (798)..(798): n is a, c, g, or t
  misc_feature (800)..(801): n is a, c, g, or t
  misc_feature (805)..(807): n is a, c, g, or t
  misc_feature (811)..(812): n is a, c, g, or t
  misc_feature (815)..(815): n is a, c, g, or t
  misc_feature (817)..(818): n is a, c, g, or t
  misc_feature (820)..(820): n is a, c, g, or t
  misc_feature (822)..(822): n is a, c, g, or t
  misc_feature (828)..(828): n is a, c, g, or t
  misc_feature (830)..(830): n is a, c, g, or t
  misc_feature (832)..(832): n is a, c, g, or t
  misc_feature (834)..(834): n is a, c, g, or t
  misc_feature (836)..(838): n is a, c, g, or t
  misc_feature (848)..(848): n is a, c, g, or t
  misc_feature (856)..(856): n is a, c, g, or t
  misc_feature (869)..(869): n is a, c, g, or t
  misc_feature (871)..(873): n is a, c, g, or t
  misc_feature (878)..(878): n is a, c, g, or t
  misc_feature (881)..(881): n is a, c, g, or t
  misc_feature (883)..(883): n is a, c, g, or t
  misc_feature (888)..(888): n is a, c, g, or t
  misc_feature (890)..(890): n is a, c, g, or t
  misc_feature (893)..(893): n is a, c, g, or t
  misc_feature (895)..(895): n is a, c, g, or t
  misc_feature (900)..(900): n is a, c, g, or t
  misc_feature (906)..(906): n is a, c, g, or t
  misc_feature (908)..(908): n is a, c, g, or t
  misc_feature (915)..(915): n is a, c, g, or t
  misc_feature (917)..(917): n is a, c, g, or t
  misc_feature (919)..(920): n is a, c, g, or t
  misc_feature (928)..(929): n is a, c, g, or t
  misc_feature (931)..(931): n is a, c, g, or t
  misc_feature (934)..(934): n is a, c, g, or t
  misc_feature (937)..(937): n is a, c, g, or t
  misc_feature (944)..(944): n is a, c, g, or t
  misc_feature (946)..(946): n is a, c, g, or t
  misc_feature (952)..(952): n is a, c, g, or t
  misc_feature (954)..(954): n is a, c, g, or t
  misc_feature (961)..(961): n is a, c, g, or t
  misc_feature (964)..(964): n is a, c, g, or t
  misc_feature (977)..(978): n is a, c, g, or t
  misc_feature (990)..(990): n is a, c, g, or t
  misc_feature (995)..(995): n is a, c, g, or t
  misc_feature (1000)..(1002): n is a, c, g, or t
  misc_feature (1005)..(1005): n is a, c, g, or t
  misc_feature (1014)..(1014): n is a, c, g, or t
  misc_feature (1019)..(1020): n is a, c, g, or t
  misc_feature (1024)..(1024): n is a, c, g, or t
  misc_feature (1029)..(1030): n is a, c, g, or t
  misc_feature (1035)..(1036): n is a, c, g, or t
  misc_feature (1039)..(1040): n is a, c, g, or t
  misc_feature (1045)..(1045): n is a, c, g, or t
  misc_feature (1051)..(1052): n is a, c, g, or t
  misc_feature (1058)..(1058): n is a, c, g, or t
  misc_feature (1067)..(1067): n is a, c, g, or t
  misc_feature (1069)..(1070): n is a, c, g, or t
  misc_feature (1082)..(1083): n is a, c, g, or t
  misc_feature (1087)..(1087): n is a, c, g, or t
  misc_feature (1096)..(1096): n is a, c, g, or t
  misc_feature (1099)..(1100): n is a, c, g, or t
  misc_feature (1107)..(1107): n is a, c, g, or t
  misc_feature (1109)..(1109): n is a, c, g, or t
  misc_feature (1124)..(1124): n is a, c, g, or t
  misc_feature (1128)..(1128): n is a, c, g, or t
  misc_feature (1132)..(1133): n is a, c, g, or t
  misc_feature (1135)..(1135): n is a, c, g, or t
  misc_feature (1140)..(1141): n is a, c, g, or t
  misc_feature (1144)..(1144): n is a, c, g, or t
  misc_feature (1152)..(1152): n is a, c, g, or t
  misc_feature (1157)..(1157): n is a, c, g, or t
  misc_feature (1159)..(1159): n is a, c, g, or t
  misc_feature (1166)..(1166): n is a, c, g, or t
  misc_feature (1168)..(1168): n is a, c, g, or t
  misc_feature (1173)..(1174): n is a, c, g, or t
  misc_feature (1176)..(1176): n is a, c, g, or t
  misc_feature (1179)..(1179): n is a, c, g, or t
  misc_feature (1184)..(1184): n is a, c, g, or t
  misc_feature (1190)..(1190): n is a, c, g, or t
  misc_feature (1193)..(1193): n is a, c, g, or t
  misc_feature (1195)..(1196): n is a, c, g, or t
  misc_feature (1198)..(1198): n is a, c, g, or t
  misc_feature (1200)..(1200): n is a, c, g, or t
  misc_feature (1203)..(1205): n is a, c, g, or t
  misc_feature (1207)..(1207): n is a, c, g, or t
  misc_feature (1210)..(1210): n is a, c, g, or t
  misc_feature (1212)..(1212): n is a, c, g, or t
  misc_feature (1214)..(1214): n is a, c, g, or t
  misc_feature (1218)..(1218): n is a, c, g, or t
  misc_feature (1222)..(1222): n is a, c, g, or t
  misc_feature (1226)..(1226): n is a, c, g, or t
  misc_feature (1229)..(1229): n is a, c, g, or t
  misc_feature (1231)..(1232): n is a, c, g, or t
  misc_feature (1239)..(1239): n is a, c, g, or t
  misc_feature (1241)..(1241): n is a, c, g, or t
  misc_feature (1246)..(1247): n is a, c, g, or t
  misc_feature (1250)..(1250): n is a, c, g, or t
  misc_feature (1254)..(1254): n is a, c, g, or t
  misc_feature (1262)..(1262): n is a, c, g, or t
  misc_feature (1266)..(1267): n is a, c, g, or t
  misc_feature (1277)..(1277): n is a, c, g, or t
  misc_feature (1280)..(1280): n is a, c, g, or t
  misc_feature (1288)..(1288): n is a, c, g, or t
  misc_feature (1291)..(1291): n is a, c, g, or t
  misc_feature (1293)..(1294): n is a, c, g, or t
  misc_feature (1299)..(1300): n is a, c, g, or t
  misc_feature (1304)..(1304): n is a, c, g, or t
  misc_feature (1309)..(1309): n is a, c, g, or t
  misc_feature (1314)..(1314): n is a, c, g, or t
  misc_feature (1320)..(1320): n is a, c, g, or t
  misc_feature (1326)..(1326): n is a, c, g, or t
  misc_feature (1335)..(1337): n is a, c, g, or t
  misc_feature (1345)..(1345): n is a, c, g, or t
  misc_feature (1353)..(1353): n is a, c, g, or t
  misc_feature (1358)..(1358): n is a, c, g, or t
  misc_feature (1361)..(1361): n is a, c, g, or t
  misc_feature (1363)..(1363): n is a, c, g, or t
  misc_feature (1366)..(1366): n is a, c, g, or t
  misc_feature (1378)..(1378): n is a, c, g, or t
  misc_feature (1383)..(1383): n is a, c, g, or t
  misc_feature (1385)..(1385): n is a, c, g, or t
  misc_feature (1393)..(1394): n is a, c, g, or t
  misc_feature (1396)..(1396): n is a, c, g, or t
  misc_feature (1409)..(1411): n is a, c, g, or t
  misc_feature (1421)..(1421): n is a, c, g, or t
  misc_feature (1430)..(1430): n is a, c, g, or t
  misc_feature (1438)..(1438): n is a, c, g, or t
  misc_feature (1441)..(1441): n is a, c, g, or t
  misc_feature (1450)..(1450): n is a, c, g, or t
  misc_feature (1453)..(1453): n is a, c, g, or t
  misc_feature (1463)..(1463): n is a, c, g, or t
  misc_feature (1467)..(1467): n is a, c, g, or t
  misc_feature (1469)..(1469): n is a, c, g, or t
  misc_feature (1473)..(1474): n is a, c, g, or t
  misc_feature (1478)..(1478): n is a, c, g, or t
  misc_feature (1483)..(1483): n is a, c, g, or t
  misc_feature (1486)..(1486): n is a, c, g, or t
  misc_feature (1494)..(1495): n is a, c, g, or t
  misc_feature (1502)..(1502): n is a, c, g, or t
  misc_feature (1506)..(1506): n is a, c, g, or t
  misc_feature (1514)..(1514): n is a, c, g, or t
  misc_feature (1521)..(1521): n is a, c, g, or t
  misc_feature (1523)..(1523): n is a, c, g, or t
acaanagagagaattactatgagaggatcgcatcaccatccccatcacggatcctatttaggtgacactatagaatcgtcgacccacgcgtccggcttcaccaccgggnatgcaggcggcccggggggcctgggcctcccctcacatgctgcaagaccctccactgacttcacgcaagcggcagctgctgcagctgtggctgctgcggcagccactgccaccgccacagccacagccaccgtggctgctctccaggagaagcagagccaggagctgagccagtatggagcgatgggggccggacagtcttttaacagccagtttctgcagcatggaggtccccgggggcctantgtccccgctggcatgaaccctactggcataggaggggtaatgggcccctctggcctctcccccttggctatgaaccccacccgggcagcatgaatgacanccttgtatgcagggcagcgtctgccccaacatgggtatnctgggcctccccaggcccanccactgccccnanagggggtcaaganaanctactctgangtgtatccncgggcagcagtatctgcaaggaggccnntatgcacccagcaacncccagtttgngnncagccctgggcagnccccngncncctcccccttactaccctgggcacaanctgccncntgcaacatgncatgacccagnnccctgtccgtacctgnccccntcgnaganngncatttttaancctaacctnnttntattcttnnagnnnatncccagnttcnncaactttccatcnaaancnnatcnnncatnntantnntncncaaaanananancnnnccccatttanatactaanataaacaaaaaangnnnaaatnctncnttttntnccntnatatntcaaancnagaaatncnanntccctttnnanttnatncttcctnangaaaancntgacccnttntaaaccaacttgnngataataaaccntctcnttatnnnccnatgaagttnatcannttancactnnttctnnttnnaaaancaaatnnttcttnttaatcccntnnttttctattcannttgnacaaaaaanaannctaaaananccctgatagaattanaacntaanntnaaaannttncttttatnagttncnttacaancntattnncnaanaaatnaaaacntanannananctnnncnatnananaaanagtnagangcncnntactctnanaaaanncanagangaagtaanaacnncaccttccanaancttatctnatntnnaatcnnaatnctcancaaantaatanaaatanaaaagcctnnnacatatanttaacatnttcanacncnttntttctactaatnaaccncnatttatanncnccctcttacttannnacatctactntaaacctcnccttcgtncantatagtacnatnacatatatanaaananatcnntatntaatnccntaattatnntattatnactntagaaaantataaanan

SEQ ID NO: 398 - DNA, 1373 bp, Homo Sapiens
  misc_feature (790)..(790): n is a, c, g, or t
  misc_feature (796)..(796): n is a, c, g, or t
  misc_feature (816)..(816): n is a, c, g, or t
  misc_feature (872)..(872): n is a, c, g, or t
  misc_feature (892)..(892): n is a, c, g, or t
  misc_feature (909)..(909): n is a, c, g, or t
  misc_feature (911)..(911): n is a, c, g, or t
  misc_feature (913)..(914): n is a, c, g, or t
  misc_feature (920)..(920): n is a, c, g, or t
  misc_feature (934)..(934): n is a, c, g, or t
  misc_feature (940)..(940): n is a, c, g, or t
  misc_feature (944)..(944): n is a, c, g, or t
  misc_feature (948)..(948): n is a, c, g, or t
  misc_feature (961)..(961): n is a, c, g, or t
  misc_feature (964)..(964): n is a, c, g, or t
  misc_feature (969)..(969): n is a, c, g, or t
  misc_feature (981)..(981): n is a, c, g, or t
  misc_feature (984)..(984): n is a, c, g, or t
  misc_feature (986)..(986): n is a, c, g, or t
  misc_feature (990)..(990): n is a, c, g, or t
  misc_feature (994)..(994): n is a, c, g, or t
  misc_feature (997)..(997): n is a, c, g, or t
  misc_feature (1000)..(1000): n is a, c, g, or t
  misc_feature (1004)..(1004): n is a, c, g, or t
  misc_feature (1007)..(1007): n is a, c, g, or t
  misc_feature (1031)..(1031): n is a, c, g, or t
  misc_feature (1036)..(1036): n is a, c, g, or t
  misc_feature (1040)..(1040): n is a, c, g, or t
  misc_feature (1042)..(1042): n is a, c, g, or t
  misc_feature (1044)..(1044): n is a, c, g, or t
  misc_feature (1046)..(1046): n is a, c, g, or t
  misc_feature (1056)..(1056): n is a, c, g, or t
  misc_feature (1060)..(1060): n is a, c, g, or t
  misc_feature (1064)..(1064): n is a, c, g, or t
  misc_feature (1067)..(1068): n is a, c, g, or t
  misc_feature (1079)..(1080): n is a, c, g, or t
  misc_feature (1084)..(1086): n is a, c, g, or t
  misc_feature (1092)..(1093): n is a, c, g, or t
  misc_feature (1104)..(1104): n is a, c, g, or t
  misc_feature (1110)..(1110): n is a, c, g, or t
  misc_feature (1112)..(1112): n is a, c, g, or t
  misc_feature (1125)..(1125): n is a, c, g, or t
  misc_feature (1132)..(1132): n is a, c, g, or t
  misc_feature (1142)..(1142): n is a, c, g, or t
  misc_feature (1145)..(1145): n is a, c, g, or t
  misc_feature (1151)..(1151): n is a, c, g, or t
  misc_feature (1167)..(1167): n is a, c, g, or t
  misc_feature (1191)..(1191): n is a, c, g, or t
  misc_feature (1193)..(1193): n is a, c, g, or t
  misc_feature (1196)..(1196): n is a, c, g, or t
  misc_feature (1204)..(1204): n is a, c, g, or t
  misc_feature (1218)..(1218): n is a, c, g, or t
  misc_feature (1222)..(1222): n is a, c, g, or t
  misc_feature (1224)..(1224): n is a, c, g, or t
  misc_feature (1232)..(1233): n is a, c, g, or t
  misc_feature (1242)..(1242): n is a, c, g, or t
  misc_feature (1253)..(1253): n is a, c, g, or t
  misc_feature (1256)..(1256): n is a, c, g, or t
  misc_feature (1262)..(1262): n is a, c, g, or t
  misc_feature (1266)..(1266): n is a, c, g, or t
  misc_feature (1273)..(1273): n is a, c, g, or t
  misc_feature (1284)..(1284): n is a, c, g, or t
  misc_feature (1303)..(1303): n is a, c, g, or t
  misc_feature (1307)..(1308): n is a, c, g, or t
  misc_feature (1311)..(1311): n is a, c, g, or t
  misc_feature (1317)..(1317): n is a, c, g, or t
  misc_feature (1329)..(1329): n is a, c, g, or t
  misc_feature (1334)..(1336): n is a, c, g, or t
  misc_feature (1344)..(1344): n is a, c, g, or t
  misc_feature (1349)..(1349): n is a, c, g, or t
  misc_feature (1351)..(1351): n is a, c, g, or t
  misc_feature (1354)..(1355): n is a, c, g, or t
  misc_feature (1360)..(1360): n is a, c, g, or t
  misc_feature (1364)..(1365): n is a, c, g, or t
  misc_feature (1367)..(1367): n is a, c, g, or t
gagaaattactatgagaggatcgcatcaccatcaccatcacggatcctatttaggtgacactatagaatcgtcgacccacgcgtccgcggacgcgtgggtgaagattgggcttgaagtatatatttttgcatttaaaagtatcacctatcatattttccactcgaaaattgacatagtagcattgaggatactctgatctagaaagccaagtatttgagcaacatctatagagatctacttttctcctatgtctcctaggctttccatgataattaggtaatacatttaagaaggatatttatttctgttttgctctattcaaagaaacggaatgggatagttattctgtaaactaagtttgtatataactttatttgggtttaatttccacaactggtatctgcaaatattgccagcattttagccatattttgggagaacttggtgtttgaggtcccaggaaatgaggtctgatcaaatgaaatgcaagcacaatttcttacagccatttaactttctattgggaggatgaattaacaaactcacattgtgcagtccgcttaatccaggcacttttctttgtgcaggtgtagtgagtagttacttctctcccttacacagatgacttgtgaaactcaagctcaccatcttcagtgctggcattttactttgccactacccaaaaacaatgtgagatgtgttcagtggcctctggtactctttgcaggcaagaatcaaacaacatggggactgagggaaggatggggaagtgtagccacagttcttccnaaatgnaaatactttttgtttgttcnagtggtaaaatgcaaatgcaatcccatatttggtaaggatggtcaggtctcatganaaatctatgctatgtgtccngaacttttgaaacagantncnntgggantgggaattagggantgtaanggangccnaaaatgtttttcntcngggcntaaaaaaactgnttncngaantccnacnttngaanaanaaacaggggggggggggttggggnaagancctnangnanaaaccccccngaangaanggnncccaaaaaacnngaannnttgacnngcctggaaaangaaaancnccccaaactgtcngaaaaangggaggggancgnggaccnccccccaccgcccccngggaggggaacttgcccccgcccngnccnggaaaaanacccccccccaaanaaantntttgaatnnatttccggncccccaagggnaangccccntttnccccggngaaaatccccnaaattttaaaaaaaaaaangggnnatncggggnttcccccttggnaaaannntagccccnaaaancnccnnccccntctnntntttccc

SEQ ID NO: 399 - DNA, 1364 bp, Homo Sapiens
  misc_feature (1)..(1): n is a, c, g, or t
  misc_feature (935)..(935): n is a, c, g, or t
  misc_feature (937)..(937): n is a, c, g, or t
  misc_feature (947)..(947): n is a, c, g, or t
  misc_feature (959)..(959): n is a, c, g, or t
  misc_feature (971)..(971): n is a, c, g, or t
  misc_feature (974)..(974): n is a, c, g, or t
  misc_feature (980)..(980): n is a, c, g, or t
  misc_feature (1003)..(1003): n is a, c, g, or t
  misc_feature (1005)..(1005): n is a, c, g, or t
  misc_feature (1022)..(1022): n is a, c, g, or t
  misc_feature (1031)..(1031): n is a, c, g, or t
  misc_feature (1059)..(1059): n is a, c, g, or t
  misc_feature (1074)..(1074): n is a, c, g, or t
  misc_feature (1082)..(1082): n is a, c, g, or t
  misc_feature (1087)..(1087): n is a, c, g, or t
  misc_feature (1094)..(1094): n is a, c, g, or t
  misc_feature (1097)..(1097): n is a, c, g, or t
  misc_feature (1101)..(1101): n is a, c, g, or t
  misc_feature (1115)..(1115): n is a, c, g, or t
  misc_feature (1129)..(1129): n is a, c, g, or t
  misc_feature (1146)..(1146): n is a, c, g, or t
  misc_feature (1185)..(1185): n is a, c, g, or t
  misc_feature (1189)..(1190): n is a, c, g, or t
  misc_feature (1197)..(1197): n is a, c, g, or t
  misc_feature (1199)..(1199): n is a, c, g, or t
  misc_feature (1203)..(1203): n is a, c, g, or t
  misc_feature (1208)..(1208): n is a, c, g, or t
  misc_feature (1219)..(1219): n is a, c, g, or t
  misc_feature (1226)..(1226): n is a, c, g, or t
  misc_feature (1231)..(1231): n is a, c, g, or t
  misc_feature (1238)..(1238): n is a, c, g, or t
  misc_feature (1262)..(1262): n is a, c, g, or t
  misc_feature (1269)..(1269): n is a, c, g, or t
  misc_feature (1275)..(1275): n is a, c, g, or t
  misc_feature (1277)..(1277): n is a, c, g, or t
  misc_feature (1282)..(1285): n is a, c, g, or t
  misc_feature (1289)..(1289): n is a, c, g, or t
  misc_feature (1296)..(1297): n is a, c, g, or t
  misc_feature (1306)..(1306): n is a, c, g, or t
  misc_feature (1308)..(1308): n is a, c, g, or t
  misc_feature (1311)..(1311): n is a, c, g, or t
  misc_feature (1317)..(1317): n is a, c, g, or t
  misc_feature (1320)..(1320): n is a, c, g, or t
  misc_feature (1323)..(1325): n is a, c, g, or t
  misc_feature (1329)..(1329): n is a, c, g, or t
  misc_feature (1332)..(1332): n is a, c, g, or t
  misc_feature (1336)..(1336): n is a, c, g, or t
  misc_feature (1339)..(1339): n is a, c, g, or t
  misc_feature (1344)..(1344): n is a, c, g, or t
  misc_feature (1348)..(1348): n is a, c, g, or t
  misc_feature (1364)..(1364): n is a, c, g, or t
nattagagaaattactatgagaggatcgcatcaccatcaccatcacggatcctatttaggtgacactatagaatcgtcgacccacgcgtccgcccacgcgtccgctacgctcataaaaggaaaaaaaagcgtgtgcggttctcgacgtgccgccaatcttcgaacgcaggtctgtgatcatccgcagactccgaaaaagggttcgaggaacgcgcctgctcccctcgtcgcagtttccagcccgacgagcttgttttgtcccggactcggtgcccctgtagacaatggccctcgtgtctgccgattcccgcattgcagaacttctcacagagcttcatcagctgatcaaacaaacccaggaagagcgttcgcggagcgaacacaacttagtgaacatccagaagacccatgagcggatgcagacagagaacaagatttctccctattaccggacaaagctgcgtggcctctacacaaccgccaaggccgatgcagaggctgagtgcaacatccttcggaaagctctggacaagatcgcggaaatcaagtctctgttggaagagaggcggattgcggccaagattgccggtctctacaatgactcggagccaccccggaagaccatgcgcagaggggtgctgatgaccctgctgcagcagtcggccatgaccctgcccctgtggatcgggaagcctggtgacaagcccccacccctctgtggggccatccctgcctcaggagactacgtggccagacctggagacaaggtggctgcccgggtgaaggtcgtggatggggacgagcagtggatcctggccgaggtggtcagttacagccatgccaccaacaagtatgaggtagatgacatcgatgaagaaggcaaagagagacacaccctgagccggcgccgtgtcatcccgctgccccagtggaangncaacccgganacggaccctgangccttgttccanaangagcanctcgtgctggccctgtatcccanantacctgcttctacgggnccctgatcnatgggcccccccagcggccccagaagantactcggtcctgttngaaaaccntcctntgcaaanggntttnccctcccctcatgnggctcaaaaaaacntgggggcttgtaagaanccaaaaaaaaggatgccgcctgggaaaatcccctccccnaaannaagggangnaaancaaanaaagggctggnattaaanccttnccccctnaaaaaaaaaaaaaaaaaaaaaaangggggcncccccnanggggnnnnatancttattnngaactgggncncgnggaaanccnaannncccnaancccnggnttttnaaanccggggcccgggtttn

SEQ ID NO: 400 - DNA, 1369 bp, Homo Sapiens
  misc_feature (1)..(1): n is a, c, g, or t
  misc_feature (894)..(894): n is a, c, g, or t
  misc_feature (908)..(908): n is a, c, g, or t
  misc_feature (930)..(930): n is a, c, g, or t
  misc_feature (970)..(970): n is a, c, g, or t
  misc_feature (977)..(977): n is a, c, g, or t
  misc_feature (998)..(998): n is a, c, g, or t
  misc_feature (1005)..(1005): n is a, c, g, or t
  misc_feature (1017)..(1017): n is a, c, g, or t
  misc_feature (1031)..(1031): n is a, c, g, or t
  misc_feature (1035)..(1035): n is a, c, g, or t
  misc_feature (1040)..(1040): n is a, c, g, or t
  misc_feature (1067)..(1067): n is a, c, g, or t
  misc_feature (1071)..(1072): n is a, c, g, or t
  misc_feature (1117)..(1117): n is a, c, g, or t
  misc_feature (1122)..(1122): n is a, c, g, or t
  misc_feature (1127)..(1127): n is a, c, g, or t
  misc_feature (1131)..(1131): n is a, c, g, or t
  misc_feature (1137)..(1137): n is a, c, g, or t
  misc_feature (1145)..(1145): n is a, c, g, or t
  misc_feature (1162)..(1162): n is a, c, g, or t
  misc_feature (1165)..(1165): n is a, c, g, or t
  misc_feature (1167)..(1167): n is a, c, g, or t
  misc_feature (1172)..(1173): n is a, c, g, or t
  misc_feature (1178)..(1178): n is a, c, g, or t
  misc_feature (1183)..(1183): n is a, c, g, or t
  misc_feature (1190)..(1191): n is a, c, g, or t
  misc_feature (1204)..(1204): n is a, c, g, or t
  misc_feature (1206)..(1206): n is a, c, g, or t
  misc_feature (1211)..(1211): n is a, c, g, or t
  misc_feature (1213)..(1213): n is a, c, g, or t
  misc_feature (1215)..(1215): n is a, c, g, or t
  misc_feature (1219)..(1219): n is a, c, g, or t
  misc_feature (1226)..(1226): n is a, c, g, or t
  misc_feature (1228)..(1231): n is a, c, g, or t
  misc_feature (1233)..(1233): n is a, c, g, or t
  misc_feature (1236)..(1256): n is a, c, g, or t
  misc_feature (1261)..(1261): n is a, c, g, or t
  misc_feature (1271)..(1272): n is a, c, g, or t
  misc_feature (1275)..(1275): n is a, c, g, or t
  misc_feature (1278)..(1278): n is a, c, g, or t
  misc_feature (1281)..(1281): n is a, c, g, or t
  misc_feature (1284)..(1284): n is a, c, g, or t
  misc_feature (1286)..(1289): n is a, c, g, or t
  misc_feature (1293)..(1293): n is a, c, g, or t
  misc_feature (1296)..(1297): n is a, c, g, or t
  misc_feature (1300)..(1301): n is a, c, g, or t
  misc_feature (1303)..(1303): n is a, c, g, or t
  misc_feature (1307)..(1307): n is a, c, g, or t
  misc_feature (1313)..(1313): n is a, c, g, or t
  misc_feature (1317)..(1317): n is a, c, g, or t
  misc_feature (1321)..(1321): n is a, c, g, or t
  misc_feature (1331)..(1331): n is a, c, g, or t
  misc_feature (1337)..(1339): n is a, c, g, or t
  misc_feature (1341)..(1341): n is a, c, g, or t
  misc_feature (1343)..(1344): n is a, c, g, or t
  misc_feature (1354)..(1354): n is a, c, g, or t
  misc_feature (1359)..(1359): n is a, c, g, or t
  misc_feature (1366)..(1366): n is a, c, g, or t
naatagagaaattactatgagaggatcgcatcaccatcaccatcacggatcctatttaggtgacactatagaatcgtcgacccacgcgtccgcccacgcgtccggcacgtgttcgcagtcgtttccgcgatgctgcctctgctgcgctgcgtgccccgtgtgctgggctcctccgtcgccggcctccgcgctgccgcgcccgcctcgcctttccggcagctcctgcagccggcaccccggctgtgcacccggcccttcgggctgctcagcgtgcgcgcaggttccgagcggcggccgggcctcctgcggcctcgcggaccctgcgcctgtggctgtggctgcggctcgctgcacaccgacggagacaaagcttttgttgatttcctgagtgatgaaattaaggaggaaagaaaaattcagaagcataaaaccctccctaagatgtctggaggttgggagctggaactgaatgggacagaagcgaaattagtgcggaaagttgccggggaaaaaatcacggtcactttcaacattaacaacagcatcccaccaacatttgatggtgaggaggaaccctcgcaagggcagaaggttgaagaacaggagcctgaactgacatcaactcccaatttcgtggttgaagttataaagaatgatgatggcaagaaggcccttgtgttggactgtcattatccagaggatgaggttggacaagaagacgaggctgagagtgacatcttctctatcagggaagttagctttcagtccactggcgagtctgaatggaaggatactaattatacactcaacacagattccttggactgggccttatatgaccacctaatggatttccttgccgaccgaggggtggacaacacttttgcagatganctggtggagctcancacagccctggagcaccaggantacattactttttcttgaaaacctcaaaagttttgtcaanaacccantaaaaccaaaaaagatgcttnaaaccanaattttcatggnaagctttggccaangaanaaatnctactctgaaactaaaaatgggctttnaaannaataacatcccaaaaatcatgggggaaaaaaaaccaaatttaaantaaangtttngggntcccanttaataanattttttccggaaaaanacnanatttnnaaaanttttnaaaaaannaaaaaaaaaaatngnttttncncncccnaaaaaanannnnanaannnnnnnnnnnnnnnnnnnnnggggncccccccaannggncanaanctnannnnaaantgnnccnngnaaancaaaancccnaacncctggttttnaaaacnnntncnnggttttttgnaaaanaaaattngaa

SEQ ID NO: 401 - DNA, 1334 bp, Homo Sapiens
  misc_feature (880)..(880): n is a, c, g, or t
  misc_feature (917)..(917): n is a, c, g, or t
  misc_feature (971)..(971): n is a, c, g, or t
  misc_feature (974)..(974): n is a, c, g, or t
  misc_feature (979)..(979): n is a, c, g, or t
  misc_feature (995)..(995): n is a, c, g, or t
  misc_feature (998)..(998): n is a, c, g, or t
  misc_feature (1012)..(1012): n is a, c, g, or t
  misc_feature (1034)..(1034): n is a, c, g, or t
  misc_feature (1042)..(1042): n is a, c, g, or t
  misc_feature (1048)..(1048): n is a, c, g, or t
  misc_feature (1055)..(1055): n is a, c, g, or t
  misc_feature (1059)..(1059): n is a, c, g, or t
  misc_feature (1062)..(1062): n is a, c, g, or t
  misc_feature (1071)..(1071): n is a, c, g, or t
  misc_feature (1077)..(1077): n is a, c, g, or t
  misc_feature (1080)..(1080): n is a, c, g, or t
  misc_feature (1083)..(1083): n is a, c, g, or t
  misc_feature (1091)..(1091): n is a, c, g, or t
  misc_feature (1096)..(1096): n is a, c, g, or t
  misc_feature (1100)..(1100): n is a, c, g, or t
  misc_feature (1105)..(1106): n is a, c, g, or t
  misc_feature (1109)..(1109): n is a, c, g, or t
  misc_feature (1113)..(1113): n is a, c, g, or t
  misc_feature (1123)..(1123): n is a, c, g, or t
  misc_feature (1132)..(1132): n is a, c, g, or t
  misc_feature (1136)..(1136): n is a, c, g, or t
  misc_feature (1139)..(1139): n is a, c, g, or t
  misc_feature (1141)..(1141): n is a, c, g, or t
  misc_feature (1148)..(1148): n is a, c, g, or t
  misc_feature (1150)..(1150): n is a, c, g, or t
  misc_feature (1155)..(1155): n is a, c, g, or t
  misc_feature (1165)..(1165): n is a, c, g, or t
  misc_feature (1175)..(1175): n is a, c, g, or t
  misc_feature (1177)..(1177): n is a, c, g, or t
  misc_feature (1179)..(1179): n is a, c, g, or t
  misc_feature (1193)..(1193): n is a, c, g, or t
  misc_feature (1195)..(1195): n is a, c, g, or t
  misc_feature (1199)..(1199): n is a, c, g, or t
  misc_feature (1203)..(1203): n is a, c, g, or t
  misc_feature (1221)..(1222): n is a, c, g, or t
  misc_feature (1229)..(1229): n is a, c, g, or t
  misc_feature (1232)..(1232): n is a, c, g, or t
  misc_feature (1236)..(1236): n is a, c, g, or t
  misc_feature (1241)..(1242): n is a, c, g, or t
  misc_feature (1244)..(1245): n is a, c, g, or t
  misc_feature (1248)..(1248): n is a, c, g, or t
  misc_feature (1251)..(1251): n is a, c, g, or t
  misc_feature (1254)..(1254): n is a, c, g, or t
  misc_feature (1257)..(1257): n is a, c, g, or t
  misc_feature (1261)..(1261): n is a, c, g, or t
  misc_feature (1265)..(1265): n is a, c, g, or t
  misc_feature (1271)..(1272): n is a, c, g, or t
  misc_feature (1284)..(1284): n is a, c, g, or t
  misc_feature (1287)..(1287): n is a, c, g, or t
  misc_feature (1289)..(1290): n is a, c, g, or t
  misc_feature (1293)..(1293): n is a, c, g, or t
  misc_feature (1297)..(1297): n is a, c, g, or t
  misc_feature (1299)..(1301): n is a, c, g, or t
  misc_feature (1306)..(1306): n is a, c, g, or t
  misc_feature (1310)..(1313): n is a, c, g, or t
  misc_feature (1315)..(1316): n is a, c, g, or t
  misc_feature (1323)..(1323): n is a, c, g, or t
  misc_feature (1325)..(1328): n is a, c, g, or t
  misc_feature (1330)..(1332): n is a, c, g, or t
tagagaaattactatgagaggatcgcatcaccatcaccatcacggatcctatttaggtgacactatagaatcgtcgacccacgcgtccgcgccgccatcctcggcgcgactcgcttctttcggttctacctgggagaatccaccgccatccgccaccatggtgaacttcacggtagaccagatccgcgccatcatggacaagaaggccaacatccgcaacatgtctgtcatcgcccacgtggaccatggcaagtccacgctgacagactccctggtgtgcaaggcgggcatcatcgcctcggcccgggccggggagacacgcttcactgatacccggaaggacgagcaggagcgttgcatcaccatcaagtcaactgccatctccctcttctacgagctctcggagaatgacttgaacttcatcaagcagagcaaggacggtgccggcttcctcatcaacctcattgactcccccgggcatgtcgacttctcctcggaggtgactgctgccctccgagtcaccgatggcgcattggtggtggtggactgcgtgtcaggcgtgtgcgtgcagacggagacagtgctgcggcaggccattgccgagcgcatcaagcctgtgctgatgatgaacaagatggaccgcgccctgctggagctgcagctggagcccgaggagctctaccagactttccagcgcatcgtggagaacgtgaacgtcatcatctccacctacggcgagggcgagagcggccccatgggcaacatcatgatcgatcctgtcctcggtaccgtgggctttgggtctggcctccacgggtgggccttcaccctgaagcagtttgccgagatgtatgtggccaagttcgccgccaaggggganggccagttggggcctgccgagcgggccaagaaagtanaggacatgatgaaaaagctgtggggtgacaggtactttgaccagccaacggcanttnagcangtcagccacaaccccnaanggaaaaactgccangcacttttgccagctgatctgnaccatctncagggnttgagcnatcnganttcaaaaanagaaangcnaangaaaaaantggantcantgganncgngaangaaaaaaagnaaccctgtnaagntgnancccctgntnctccnaaaccttttnaaaaatccancncngccccccgggaggncnaaancctngaattttaaaaaggcccnnaaaaagntcngggntaaanngnnccnagnccnttnaaantttnaagggnnccccaaaagggnttncnnttnaaantnnnggggncccnnnngnnaaaaggncnnnncnnnaa

SEQ ID NO: 402 - DNA, 1369 bp, Homo Sapiens
  misc_feature (1)..(1): n is a, c, g, or t
  misc_feature (775)..(775): n is a, c, g, or t
  misc_feature (877)..(877): n is a, c, g, or t
  misc_feature (918)..(918): n is a, c, g, or t
  misc_feature (979)..(979): n is a, c, g, or t
  misc_feature (988)..(988): n is a, c, g, or t
  misc_feature (1020)..(1020): n is a, c, g, or t
  misc_feature (1023)..(1023): n is a, c, g, or t
  misc_feature (1031)..(1031): n is a, c, g, or t
  misc_feature (1037)..(1037): n is a, c, g, or t
  misc_feature (1055)..(1057): n is a, c, g, or t
  misc_feature (1062)..(1062): n is a, c, g, or t
  misc_feature (1077)..(1077): n is a, c, g, or t
  misc_feature (1083)..(1083): n is a, c, g, or t
  misc_feature (1099)..(1099): n is a, c, g, or t
  misc_feature (1105)..(1105): n is a, c, g, or t
  misc_feature (1109)..(1109): n is a, c, g, or t
  misc_feature (1127)..(1127): n is a, c, g, or t
  misc_feature (1137)..(1137): n is a, c, g, or t
  misc_feature (1140)..(1140): n is a, c, g, or t
  misc_feature (1148)..(1148): n is a, c, g, or t
  misc_feature (1151)..(1151): n is a, c, g, or t
  misc_feature (1153)..(1153): n is a, c, g, or t
  misc_feature (1155)..(1155): n is a, c, g, or t
  misc_feature (1158)..(1158): n is a, c, g, or t
  misc_feature (1165)..(1165): n is a, c, g, or t
  misc_feature (1174)..(1174): n is a, c, g, or t
  misc_feature (1177)..(1177): n is a, c, g, or t
  misc_feature (1181)..(1183): n is a, c, g, or t
  misc_feature (1187)..(1187): n is a, c, g, or t
  misc_feature (1199)..(1199): n is a, c, g, or t
  misc_feature (1202)..(1202): n is a, c, g, or t
  misc_feature (1205)..(1206): n is a, c, g, or t
  misc_feature (1208)..(1208): n is a, c, g, or t
  misc_feature (1210)..(1210): n is a, c, g, or t
  misc_feature (1212)..(1212): n is a, c, g, or t
  misc_feature (1216)..(1216): n is a, c, g, or t
  misc_feature (1220)..(1221): n is a, c, g, or t
  misc_feature (1223)..(1223): n is a, c, g, or t
  misc_feature (1226)..(1226): n is a, c, g, or t
  misc_feature (1231)..(1231): n is a, c, g, or t
  misc_feature (1248)..(1249): n is a, c, g, or t
  misc_feature (1251)..(1251): n is a, c, g, or t
  misc_feature (1258)..(1258): n is a, c, g, or t
  misc_feature (1269)..(1269): n is a, c, g, or t
  misc_feature (1272)..(1272): n is a, c, g, or t
  misc_feature (1275)..(1277): n is a, c, g, or t
  misc_feature (1281)..(1281): n is a, c, g, or t
  misc_feature (1286)..(1286): n is a, c, g, or t
  misc_feature (1288)..(1288): n is a, c, g, or t
  misc_feature (1290)..(1290): n is a, c, g, or t
  misc_feature (1292)..(1292): n is a, c, g, or t
  misc_feature (1294)..(1294): n is a, c, g, or t
  misc_feature (1296)..(1297): n is a, c, g, or t
  misc_feature (1305)..(1305): n is a, c, g, or t
  misc_feature (1311)..(1311): n is a, c, g, or t
  misc_feature (1314)..(1314): n is a, c, g, or t
  misc_feature (1319)..(1319): n is a, c, g, or t
  misc_feature (1326)..(1326): n is a, c, g, or t
  misc_feature (1340)..(1341): n is a, c, g, or t
  misc_feature (1353)..(1353): n is a, c, g, or t
  misc_feature (1356)..(1358): n is a, c, g, or t
  misc_feature (1361)..(1362): n is a, c, g, or t
  misc_feature (1367)..(1367): n is a, c, g, or t
naatagagaaattactatgagaggatcgcatcaccatcaccatcacggatcctatttaggtgacactatagaatcgtcgacccacgcgtccggtctggatttccaaggaagaatttcctctgaagcaccggaacttgctactaccagcaccatgccctaccaatatccagcactgaccccggagcagaagaaggagctgtctgacatcgctcaccgcatcgtggcacctggcaagggcatcctggctgcagatgagtccactgggagcattgccaagcggctgcagtccattggcaccgagaacaccgaggagaaccggcgcttctaccgccagctgctgctgacagctgacgaccgcgtgaacccctgcattgggggtgtcatcctcttccatgagacactctaccagaaggcggatgatgggcgtcccttcccccaagttatcaaatccaagggcggtgttgtgggcatcaaggtagacaagggcgtggtccccctggcagggacaaatggcgagactaccacccaagggttggatgggctgtctgagcgctgtgcccagtacaagaaggacggagctgacttcgccaagtggcgttgtgtgctgaagattggggaacacaccccctcagccctcgccatcatggaaaatgccaatgttctggcccgttatgccagtatctgccagcagaatggcattgtgcccatcgtggagcctgagatcctccctgatggggaccatgacttgaagcgctgccagtatgtgaccgagaangtgctggctgctgtctacaaggctctgagtgaccaccacatctacctggaaggcaccttgctgaagcccaacatggtcaccccaggccatgcttgcactcanaagttttctcatgaggaaattgcccatggcgaccgtcacancgctgcgccgcaagtgccccccgctgtcactgggatcaccttcctgtctggaggcccaaantgaggaagnaggcgtccatcaacctcaatgccattaaaaantgnccccctgnttgaanccctgggccctgaacttnnncttanggccgaaaccctggnaggccntttgcccttaaaggcntggggncggnaaaaaagaaaacttgaangcttgcccangangaaatatnttnangnaanccctggnccaaaaacnttncctnnnaagnaaaaaacctccnaanggnncngntngggntttnncnaanaaatnccttttttttttaaacnncnaattaangggagggtttnccnggnnncccnaaaantnangncntnncccctccnttttanaanaaagnccccccngggccccaggggtnncccccctttttnccnnngannggggngg

SEQ ID NO: 403 - DNA, 1416 bp, Homo Sapiens
  misc_feature (832)..(832): n is a, c, g, or t
  misc_feature (927)..(927): n is a, c, g, or t
  misc_feature (959)..(960): n is a, c, g, or t
  misc_feature (983)..(983): n is a, c, g, or t
  misc_feature (995)..(995): n is a, c, g, or t
  misc_feature (1007)..(1007): n is a, c, g, or t
  misc_feature (1018)..(1019): n is a, c, g, or t
  misc_feature (1048)..(1048): n is a, c, g, or t
  misc_feature (1055)..(1055): n is a, c, g, or t
  misc_feature (1069)..(1069): n is a, c, g, or t
  misc_feature (1071)..(1072): n is a, c, g, or t
  misc_feature (1074)..(1074): n is a, c, g, or t
  misc_feature (1077)..(1077): n is a, c, g, or t
  misc_feature (1096)..(1096): n is a, c, g, or t
  misc_feature (1125)..(1125): n is a, c, g, or t
  misc_feature (1128)..(1128): n is a, c, g, or t
  misc_feature (1134)..(1134): n is a, c, g, or t
  misc_feature (1148)..(1148): n is a, c, g, or t
  misc_feature (1153)..(1153): n is a, c, g, or t
  misc_feature (1155)..(1155): n is a, c, g, or t
  misc_feature (1158)..(1158): n is a, c, g, or t
  misc_feature (1175)..(1175): n is a, c, g, or t
  misc_feature (1178)..(1178): n is a, c, g, or t
  misc_feature (1198)..(1198): n is a, c, g, or t
  misc_feature (1211)..(1211): n is a, c, g, or t
  misc_feature (1216)..(1216): n is a, c, g, or t
  misc_feature (1218)..(1218): n is a, c, g, or t
  misc_feature (1221)..(1221): n is a, c, g, or t
  misc_feature (1224)..(1224): n is a, c, g, or t
  misc_feature (1226)..(1226): n is a, c, g, or t
  misc_feature (1236)..(1237): n is a, c, g, or t
  misc_feature (1239)..(1239): n is a, c, g, or t
  misc_feature (1252)..(1252): n is a, c, g, or t
  misc_feature (1259)..(1260): n is a, c, g, or t
  misc_feature (1274)..(1274): n is a, c, g, or t
  misc_feature (1286)..(1286): n is a, c, g, or t
  misc_feature (1290)..(1290): n is a, c, g, or t
  misc_feature (1293)..(1293): n is a, c, g, or t
  misc_feature (1296)..(1296): n is a, c, g, or t
  misc_feature (1299)..(1299): n is a, c, g, or t
  misc_feature (1301)..(1302): n is a, c, g, or t
  misc_feature (1306)..(1306): n is a, c, g, or t
  misc_feature (1311)..(1311): n is a, c, g, or t
  misc_feature (1316)..(1317): n is a, c, g, or t
  misc_feature (1320)..(1320): n is a, c, g, or t
  misc_feature (1326)..(1326): n is a, c, g, or t
  misc_feature (1332)..(1332): n is a, c, g, or t
  misc_feature (1336)..(1337): n is a, c, g, or t
  misc_feature (1343)..(1343): n is a, c, g, or t
  misc_feature (1348)..(1348): n is a, c, g, or t
  misc_feature (1351)..(1352): n is a, c, g, or t
  misc_feature (1363)..(1363): n is a, c, g, or t
  misc_feature (1372)..(1372): n is a, c, g, or t
  misc_feature (1378)..(1378): n is a, c, g, or t
  misc_feature (1380)..(1380): n is a, c, g, or t
  misc_feature (1384)..(1384): n is a, c, g, or t
  misc_feature (1387)..(1387): n is a, c, g, or t
  misc_feature (1399)..(1400): n is a, c, g, or t
  misc_feature (1406)..(1407): n is a, c, g, or t
  misc_feature (1409)..(1409): n is a, c, g, or t
  misc_feature (1415)..(1415): n is a, c, g, or t
atagagaaaattactatgagaggatcgcatcaccatcaccatcacggatcctatttaggtgacactatagaatcgtcgacccacgcgtccgcccacgcgtccgattacagtgagttctctggtgatgttgatagcctggaactgggggacatggtcgagtatagcttgtccaaaggcaaaggcaacaaagtcagtgcagaaaaagtgaacaaaacacactcagtgaatggcattactgaggaagctgatcccaccatttactctggcaaagtaattcgccccctgaggagtgttgatccaacacagactgagtaccaaggaatgattgagattgtggaggagggcgatatgaaaggtgaggtctatccatttggcatcgttgggatggccaacaaaggggattgcctgcagaaaggggagagcgtcaagttccaattgtgtgtcctgggccaaaatgcacaaactatggcttacaacatcacacccctgcgcagggccacagtggaatgtgtgaaagatcagtttggcttcattaactatgaagtaggagatagcaagaagctctttttccatgtgaaagaagttcaggatggcattgagctacaggcaggagatgaggtggagttctcagtgattcttaatcagcgcactggcaagtgcagcgcctgtaatgtttggcgagtctgtgagggccccaaggctgttgcagctcctcgacctgatcggttggtcaatcgcttgaagaatatcactctggatgatgccagtgctcctcgcctaatggttcttcgtcagccaaggggaccagataactcaatggggtttggtgcanaaagaaagatccgtcaagctggtgtcattgactaaccacatccacaaagcacaccattaatccactatgatcaagttggggggaatctggtgaanggttctgaatatctccctcttcatccctcccnnaaatctggaatacttattctatngaagctattacncccattttaacnccttcccccgnnttatgtttaaaaaaataaataaatttaanaaaaccnttttaaataatgcncnntngcnccctggaaaaacttaaggnggcccccttaaatatcaattttaagaacnttntttggngcattaacccactnggaantngcnaaacccctttgccgggnaantgaaaaaaaaaacggtttcntgttggccccaanaaatncnccnttncntaaaaacccnncntccataatacccngggaaannttcccctaaccccnggcatctttccntttnccnggncangnntatncgagnccaannggnaaaatntttttnaaannaaattnttagnccnncttttaggggnccatttaantttttncnttanccncccccccaaaanntttttnnanttcccna

SEQ ID NO: 404 - DNA, 1573 bp, Homo Sapiens
  misc_feature (1)..(1): n is a, c, g, or t
  misc_feature (3)..(3): n is a, c, g, or t
  misc_feature (6)..(6): n is a, c, g, or t
  misc_feature (136)..(136): n is a, c, g, or t
  misc_feature (235)..(235): n is a, c, g, or t
  misc_feature (321)..(321): n is a, c, g, or t
  misc_feature (326)..(326): n is a, c, g, or t
  misc_feature (337)..(337): n is a, c, g, or t
  misc_feature (357)..(357): n is a, c, g, or t
  misc_feature (367)..(367): n is a, c, g, or t
  misc_feature (394)..(394): n is a, c, g, or t
  misc_feature (397)..(397): n is a, c, g, or t
  misc_feature (400)..(400): n is a, c, g, or t
  misc_feature (411)..(411): n is a, c, g, or t
  misc_feature (418)..(418): n is a, c, g, or t
  misc_feature (421)..(423): n is a, c, g, or t
  misc_feature (438)..(438): n is a, c, g, or t
  misc_feature (441)..(441): n is a, c, g, or t
  misc_feature (444)..(444): n is a, c, g, or t
  misc_feature (449)..(449): n is a, c, g, or t
  misc_feature (458)..(458): n is a, c, g, or t
  misc_feature (460)..(460): n is a, c, g, or t
  misc_feature (477)..(477): n is a, c, g, or t
  misc_feature (479)..(479): n is a, c, g, or t
  misc_feature (484)..(485): n is a, c, g, or t
  misc_feature (488)..(488): n is a, c, g, or t
  misc_feature (493)..(493): n is a, c, g, or t
  misc_feature (496)..(496): n is a, c, g, or t
  misc_feature (498)..(499): n is a, c, g, or t
  misc_feature (504)..(504): n is a, c, g, or t
  misc_feature (517)..(517): n is a, c, g, or t
  misc_feature (519)..(519): n is a, c, g, or t
  misc_feature (527)..(527): n is a, c, g, or t
  misc_feature (530)..(531): n is a, c, g, or t
  misc_feature (538)..(538): n is a, c, g, or t
  misc_feature (540)..(540): n is a, c, g, or t
  misc_feature (542)..(542): n is a, c, g, or t
  misc_feature (551)..(551): n is a, c, g, or t
  misc_feature (557)..(558): n is a, c, g, or t
  misc_feature (560)..(561): n is a, c, g, or t
  misc_feature (564)..(566): n is a, c, g, or t
  misc_feature (572)..(572): n is a, c, g, or t
  misc_feature (576)..(576): n is a, c, g, or t
  misc_feature (583)..(583): n is a, c, g, or t
  misc_feature (586)..(587): n is a, c, g, or t
  misc_feature (589)..(590): n is a, c, g, or t
  misc_feature (593)..(594): n is a, c, g, or t
  misc_feature (601)..(601): n is a, c, g, or t
  misc_feature (609)..(610): n is a, c, g, or t
  misc_feature (612)..(612): n is a, c, g, or t
  misc_feature (615)..(616): n is a, c, g, or t
  misc_feature (628)..(629): n is a, c, g, or t
  misc_feature (631)..(632): n is a, c, g, or t
  misc_feature (634)..(634): n is a, c, g, or t
  misc_feature (638)..(638): n is a, c, g, or t
  misc_feature (650)..(650): n is a, c, g, or t
  misc_feature (655)..(655): n is a, c, g, or t
  misc_feature (660)..(660): n is a, c, g, or t
  misc_feature (664)..(664): n is a, c, g, or t
  misc_feature (672)..(672): n is a, c, g, or t
  misc_feature (675)..(675): n is a, c, g, or t
  misc_feature (679)..(681): n is a, c, g, or t
  misc_feature (683)..(683): n is a, c, g, or t
  misc_feature (686)..(686): n is a, c, g, or t
  misc_feature (700)..(700): n is a, c, g, or t
  misc_feature (704)..(704): n is a, c, g, or t
  misc_feature (706)..(707): n is a, c, g, or t
  misc_feature (711)..(711): n is a, c, g, or t
  misc_feature (714)..(714): n is a, c, g, or t
  misc_feature (717)..(717): n is a, c, g, or t
  misc_feature (720)..(720): n is a, c, g, or t
  misc_feature (726)..(726): n is a, c, g, or t
  misc_feature (729)..(730): n is a, c, g, or t
  misc_feature (733)..(734): n is a, c, g, or t
  misc_feature (737)..(737): n is a, c, g, or t
  misc_feature (745)..(745): n is a, c, g, or t
  misc_feature (747)..(747): n is a, c, g, or t
  misc_feature (751)..(751): n is a, c, g, or t
  misc_feature (754)..(755): n is a, c, g, or t
  misc_feature (757)..(757): n is a, c, g, or t
  misc_feature (766)..(766): n is a, c, g, or t
  misc_feature (768)..(769): n is a, c, g, or t
  misc_feature (774)..(774): n is a, c, g, or t
  misc_feature (776)..(777): n is a, c, g, or t
  misc_feature (780)..(780): n is a, c, g, or t
  misc_feature (782)..(782): n is a, c, g, or t
  misc_feature (784)..(784): n is a, c, g, or t
  misc_feature (789)..(790): n is a, c, g, or t
  misc_feature (793)..(794): n is a, c, g, or t
  misc_feature (796)..(796): n is a, c, g, or t
  misc_feature (799)..(799): n is a, c, g, or t
  misc_feature (805)..(808): n is a, c, g, or t
  misc_feature (810)..(810): n is a, c, g, or t
  misc_feature (814)..(814): n is a, c, g, or t
  misc_feature (818)..(819): n is a, c, g, or t
  misc_feature (825)..(825): n is a, c, g, or t
  misc_feature (827)..(827): n is a, c, g, or t
  misc_feature (833)..(833): n is a, c, g, or t
  misc_feature (843)..(844): n is a, c, g, or t
  misc_feature (851)..(851): n is a, c, g, or t
  misc_feature (854)..(856): n is a, c, g, or t
  misc_feature (861)..(861): n is a, c, g, or t
  misc_feature (870)..(873): n is a, c, g, or t
  misc_feature (878)..(879): n is a, c, g, or t
  misc_feature (881)..(881): n is a, c, g, or t
  misc_feature (883)..(885): n is a, c, g, or t
  misc_feature (894)..(894): n is a, c, g, or t
  misc_feature (897)..(898): n is a, c, g, or t
  misc_feature (902)..(903): n is a, c, g, or t
  misc_feature (906)..(906): n is a, c, g, or t
  misc_feature (911)..(911): n is a, c, g, or t
  misc_feature (921)..(921): n is a, c, g, or t
  misc_feature (924)..(924): n is a, c, g, or t
  misc_feature (933)..(933): n is a, c, g, or t
  misc_feature (936)..(936): n is a, c, g, or t
  misc_feature (949)..(949): n is a, c, g, or t
  misc_feature (952)..(952): n is a, c, g, or t
  misc_feature (954)..(954): n is a, c, g, or t
  misc_feature (960)..(960): n is a, c, g, or t
  misc_feature (962)..(962): n is a, c, g, or t
  misc_feature (968)..(968): n is a, c, g, or t
  misc_feature (973)..(976): n is a, c, g, or t
  misc_feature (979)..(980): n is a, c, g, or t
  misc_feature (986)..(986): n is a, c, g, or t
  misc_feature (989)..(990): n is a, c, g, or t
  misc_feature (992)..(992): n is a, c, g, or t
  misc_feature (995)..(995): n is a, c, g, or t
  misc_feature (999)..(999): n is a, c, g, or t
  misc_feature (1002)..(1002): n is a, c, g, or t
  misc_feature (1005)..(1005): n is a, c, g, or t
  misc_feature (1013)..(1013): n is a, c, g, or t
  misc_feature (1021)..(1021): n is a, c, g, or t
  misc_feature (1024)..(1024): n is a, c, g, or t
  misc_feature (1028)..(1030): n is a, c, g, or t
  misc_feature (1035)..(1035): n is a, c, g, or t
  misc_feature (1037)..(1040): n is a, c, g, or t
  misc_feature (1046)..(1046): n is a, c, g, or t
  misc_feature (1048)..(1049): n is a, c, g, or t
  misc_feature (1055)..(1058): n is a, c, g, or t
  misc_feature (1070)..(1070): n is a, c, g, or t
  misc_feature (1072)..(1072): n is a, c, g, or t
  misc_feature (1078)..(1078): n is a, c, g, or t
  misc_feature (1083)..(1083): n is a, c, g, or t
  misc_feature (1086)..(1086): n is a, c, g, or t
  misc_feature (1089)..(1089): n is a, c, g, or t
  misc_feature (1095)..(1095): n is a, c, g, or t
  misc_feature (1099)..(1099): n is a, c, g, or t
  misc_feature (1102)..(1102): n is a, c, g, or t
  misc_feature (1107)..(1108): n is a, c, g, or t
  misc_feature (1111)..(1111): n is a, c, g, or t
  misc_feature (1116)..(1116): n is a, c, g, or t
  misc_feature (1118)..(1118): n is a, c, g, or t
  misc_feature (1122)..(1123): n is a, c, g, or t
  misc_feature (1125)..(1126): n is a, c, g, or t
  misc_feature (1128)..(1129): n is a, c, g, or t
  misc_feature (1135)..(1135): n is a, c, g, or t
  misc_feature (1152)..(1156): n is a, c, g, or t
  misc_feature (1160)..(1160): n is a, c, g, or t
  misc_feature (1165)..(1165): n is a, c, g, or t
  misc_feature (1171)..(1171): n is a, c, g, or t
  misc_feature (1173)..(1173): n is a, c, g, or t
  misc_feature (1175)..(1176): n is a, c, g, or t
  misc_feature (1182)..(1182): n is a, c, g, or t
  misc_feature (1184)..(1184): n is a, c, g, or t
  misc_feature (1191)..(1191): n is a, c, g, or t
  misc_feature (1196)..(1196): n is a, c, g, or t
  misc_feature (1198)..(1198): n is a, c, g, or t
  misc_feature (1200)..(1200): n is a, c, g, or t
  misc_feature (1209)..(1211): n is a, c, g, or t
  misc_feature (1214)..(1214): n is a, c, g, or t
  misc_feature (1216)..(1216): n is a, c, g, or t
  misc_feature (1219)..(1219): n is a, c, g, or t
  misc_feature (1224)..(1224): n is a, c, g, or t
  misc_feature (1229)..(1229): n is a, c, g, or t
  misc_feature (1231)..(1231): n is a, c, g, or t
  misc_feature (1239)..(1240): n is a, c, g, or t
  misc_feature (1242)..(1242): n is a, c, g, or t
  misc_feature (1245)..(1245): n is a, c, g, or t
  misc_feature (1249)..(1250): n is a, c, g, or t
  misc_feature (1252)..(1253): n is a, c, g, or t
  misc_feature (1255)..(1255): n is a, c, g, or t
  misc_feature (1262)..(1264): n is a, c, g, or t
  misc_feature (1266)..(1266): n is a, c, g, or t
  misc_feature (1274)..(1274): n is a, c, g, or t
  misc_feature (1278)..(1278): n is a, c, g, or t
  misc_feature (1285)..(1285): n is a, c, g, or t
  misc_feature (1288)..(1288): n is a, c, g, or t
  misc_feature (1297)..(1298): n is a, c, g, or t
  misc_feature (1300)..(1300): n is a, c, g, or t
  misc_feature (1303)..(1303): n is a, c, g, or t
  misc_feature (1305)..(1305): n is a, c, g, or t
  misc_feature (1309)..(1310): n is a, c, g, or t
  misc_feature (1312)..(1312): n is a, c, g, or t
  misc_feature (1314)..(1314): n is a, c, g, or t
  misc_feature (1320)..(1321): n is a, c, g, or t
  misc_feature (1327)..(1327): n is a, c, g, or t
  misc_feature (1330)..(1332): n is a, c, g, or t
  misc_feature (1343)..(1343): n is a, c, g, or t
  misc_feature (1351)..(1352): n is a, c, g, or t
  misc_feature (1354)..(1354): n is a, c, g, or t
  misc_feature (1357)..(1357): n is a, c, g, or t
  misc_feature (1361)..(1361): n is a, c, g, or t
  misc_feature (1364)..(1364): n is a, c, g, or t
  misc_feature (1368)..(1368): n is a, c, g, or t
  misc_feature (1371)..(1371): n is a, c, g, or t
  misc_feature (1377)..(1377): n is a, c, g, or t
  misc_feature (1380)..(1381): n is a, c, g, or t
  misc_feature (1385)..(1386): n is a, c, g, or t
  misc_feature (1389)..(1389): n is a, c, g, or t
  misc_feature (1391)..(1391): n is a, c, g, or t
  misc_feature (1394)..(1394): n is a, c, g, or t
  misc_feature (1396)..(1396): n is a, c, g, or t
  misc_feature (1401)..(1401): n is a, c, g, or t
  misc_feature (1406)..(1406): n is a, c, g, or t
  misc_feature (1409)..(1409): n is a, c, g, or t
  misc_feature (1412)..(1415): n is a, c, g, or t
  misc_feature (1421)..(1421): n is a, c, g, or t
  misc_feature (1432)..(1432): n is a, c, g, or t
  misc_feature (1437)..(1439): n is a, c, g, or t
  misc_feature (1441)..(1441): n is a, c, g, or t
  misc_feature (1446)..(1446): n is a, c, g, or t
  misc_feature (1450)..(1450): n is a, c, g, or t
  misc_feature (1454)..(1454): n is a, c, g, or t
  misc_feature (1457)..(1457): n is a, c, g, or t
  misc_feature (1463)..(1463): n is a, c, g, or t
  misc_feature (1465)..(1465): n is a, c, g, or t
  misc_feature (1475)..(1476): n is a, c, g, or t
  misc_feature (1496)..(1496): n is a, c, g, or t
  misc_feature (1500)..(1500): n is a, c, g, or t
  misc_feature (1503)..(1503): n is a, c, g, or t
  misc_feature (1507)..(1508): n is a, c, g, or t
  misc_feature (1510)..(1510): n is a, c, g, or t
  misc_feature (1523)..(1523): n is a, c, g, or t
  misc_feature (1542)..(1542): n is a, c, g, or t
  misc_feature (1546)..(1546): n is a, c, g, or t
  misc_feature (1548)..(1548): n is a, c, g, or t
  misc_feature (1551)..(1551): n is a, c, g, or t
  misc_feature (1553)..(1553): n is a, c, g, or t
  misc_feature (1556)..(1556): n is a, c, g, or t
  misc_feature (1558)..(1558): n is a, c, g, or t
  misc_feature (1561)..(1561): n is a, c, g, or t
  misc_feature (1565)..(1565): n is a, c, g, or t
nanaanagagaaattactatggagaggatcgcatcaccatcaccatcacggtatcctatttaggtgacactatagaatcgtcgacccacgcgctccgccctgacgcagcggggaagacgactcggtttatcagcanaataagtcggtgagcaccgacgagctggggcccccagggcggctggagggcgcgccccggcccgtggcccgcgagaagacctcgctgggcagcctgaancgcgccagcgtggacgtggacctgctggccccgcgcagccccatggccaaggagaacatggtgaccttcagccacacgctgcccanggccngcgcgccctcnctggacgaccccgcgcgccnccacatgaanatccacgtgccgctggacgcctctcgntcnaancatctcatcancgagtgnaannntaataccctgaaggnccncgncctgnggctgcccnantacgccagttcccgggnanctgcnntcncccgncgnanncatgncgtatgagaaganantattgatntannactaaanangncatattacnaaggannanntannngtgagnatcnatcgggnccnngnnccnntccctcnctctacanncnctnnttgtcaagaacnnanncnagtnctgtgagccttnaatantattncttnctacactntanactnnntncanaacttcctcctggngtancnntccnctnaanaangcactnacnnttnnttnttacacanantttngtnncnccaaatatnannaaacntnntantntnccacnnatnntntancattannnntntcgntttnnttatcntntcaatntaattaactnntctcacnatnnnttaanttcaaactnnnntcttnnantnnntatatttantannttannccntagtnctccattttnttntttaatacngcnctttatttctccnatntnactctntnaaaaanccttnnnnatnntagatnatnnanctntatnaantantttctctnctctcatnttnctannntttantnnnntcgctncnnttcttnnnnatacttatcatnantgttanattcntcnatnaaattnctcnttntcccnnatntcctntnactnngnntnnattaanatccaaatcattcaccnnnnntttntttcngcttcncnanntatgtnanttcaatnacatntntnatcctcatnnntantnctntcctncttantnttttcatnntntcntatnncnntncttaatnnncnttttattnctantctattntcnctatcatcnnantananttcnntnanccattnnaatagntannnataatttattntctcatanntnatnattnctnatanaantttaanttnncacnngcncntcntncaacntttanttnttnnnntatatnattctttaatnttctnnntntattnaatnatcntanataatntnaactcatttnntctactattcatacatcctnttanctnatcnncntatctaattcatntattctacctatatatgtnatananatnantcntnttntccntctttctg

SEQ ID NO: 405 - DNA, 1417 bp, Homo Sapiens
  misc_feature (728)..(729): n is a, c, g, or t
  misc_feature (738)..(739): n is a, c, g, or t
  misc_feature (743)..(748): n is a, c, g, or t
  misc_feature (750)..(791): n is a, c, g, or t
  misc_feature (811)..(811): n is a, c, g, or t
  misc_feature (838)..(838): n is a, c, g, or t
  misc_feature (855)..(855): n is a, c, g, or t
  misc_feature (857)..(857): n is a, c, g, or t
  misc_feature (864)..(864): n is a, c, g, or t
  misc_feature (912)..(912): n is a, c, g, or t
  misc_feature (931)..(931): n is a, c, g, or t
  misc_feature (953)..(953): n is a, c, g, or t
  misc_feature (963)..(963): n is a, c, g, or t
  misc_feature (969)..(969): n is a, c, g, or t
  misc_feature (975)..(975): n is a, c, g, or t
  misc_feature (978)..(978): n is a, c, g, or t
  misc_feature (989)..(989): n is a, c, g, or t
  misc_feature (1006)..(1006): n is a, c, g, or t
  misc_feature (1032)..(1032): n is a, c, g, or t
  misc_feature (1035)..(1037): n is a, c, g, or t
  misc_feature (1040)..(1041): n is a, c, g, or t
  misc_feature (1050)..(1050): n is a, c, g, or t
  misc_feature (1060)..(1061): n is a, c, g, or t
  misc_feature (1067)..(1068): n is a, c, g, or t
  misc_feature (1076)..(1076): n is a, c, g, or t
  misc_feature (1079)..(1079): n is a, c, g, or t
  misc_feature (1092)..(1092): n is a, c, g, or t
  misc_feature (1101)..(1102): n is a, c, g, or t
  misc_feature (1108)..(1108): n is a, c, g, or t
  misc_feature (1117)..(1117): n is a, c, g, or t
  misc_feature (1125)..(1125): n is a, c, g, or t
  misc_feature (1132)..(1133): n is a, c, g, or t
  misc_feature (1143)..(1143): n is a, c, g, or t
  misc_feature (1146)..(1146): n is a, c, g, or t
  misc_feature (1149)..(1150): n is a, c, g, or t
  misc_feature (1152)..(1152): n is a, c, g, or t
  misc_feature (1158)..(1158): n is a, c, g, or t
  misc_feature (1160)..(1160): n is a, c, g, or t
  misc_feature (1163)..(1163): n is a, c, g, or t
  misc_feature (1168)..(1169): n is a, c, g, or t
  misc_feature (1185)..(1185): n is a, c, g, or t
  misc_feature (1187)..(1187): n is a, c, g, or t
  misc_feature (1191)..(1191): n is a, c, g, or t
  misc_feature (1194)..(1194): n is a, c, g, or t
  misc_feature (1196)..(1197): n is a, c, g, or t
  misc_feature (1204)..(1204): n is a, c, g, or t
  misc_feature (1211)..(1211): n is a, c, g, or t
  misc_feature (1216)..(1216): n is a, c, g, or t
  misc_feature (1219)..(1219): n is a, c, g, or t
  misc_feature (1229)..(1229): n is a, c, g, or t
  misc_feature (1231)..(1231): n is a, c, g, or t
  misc_feature (1243)..(1243): n is a, c, g, or t
  misc_feature (1247)..(1248): n is a, c, g, or t
  misc_feature (1262)..(1262): n is a, c, g, or t
  misc_feature (1268)..(1268): n is a, c, g, or t
  misc_feature (1286)..(1286): n is a, c, g, or t
  misc_feature (1301)..(1301): n is a, c, g, or t
  misc_feature (1319)..(1319): n is a, c, g, or t
  misc_feature (1327)..(1327): n is a, c, g, or t
  misc_feature (1349)..(1349): n is a, c, g, or t
  misc_feature (1357)..(1357): n is a, c, g, or t
  misc_feature (1361)..(1362): n is a, c, g, or t
  misc_feature (1371)..(1371): n is a, c, g, or t
  misc_feature (1379)..(1379): n is a, c, g, or t
  misc_feature (1384)..(1384): n is a, c, g, or t
  misc_feature (1387)..(1387): n is a, c, g, or t
  misc_feature (1395)..(1395): n is a, c, g, or t
  misc_feature (1397)..(1397): n is a, c, g, or t
  misc_feature (1399)..(1400): n is a, c, g, or t
  misc_feature (1402)..(1402): n is a, c, g, or t
  misc_feature (1406)..(1406): n is a, c, g, or t
  misc_feature (1415)..(1415): n is a, c, g, or t
  misc_feature (1417)..(1417): n is a, c, g, or t
attagagaaattactatgagaggatcgcatcaccatcaccatcacggatcctatttaggtgacactatagaatcgtcgacccacgcgtccggcagcctcccccttgagccccctcgcttcccgacgttccgttcccccctgcccgccttctcccgccaccgccgccgccgccttccgcaggccgtttccaccgaggaaaaggaatcgtatcgtatgtccgctatccagaacctccactctttcgacccctttgctgatgcaagtaagggtgatgacctgcttcctgctggcactgaggattatatccatataagaattcaacagagaaacggcaggaagacccttactactgtccaagggatcgctgatgattacgataaaaagaaactagtgaaggcgtttaagaaaaagtttgcctgcaatggtactgtaattgagcatccggaatatggagaagtaattcagctacagggtgaccaacgcaagaacatatgccagttcctcgtagagattggactggctaaggacgatcagctgaaggttcatgggttttaagtgcttgtggctcactgaagcttaagtgaggatttccttgcaatgagtagaatttcccttctctcccttgtcacaggtttaaaaacctcacagcttgtataatgtaaccatttggggtccgcttttaacttggactagtgtaactccttcatgcaataaactgaaaagagccnnaaaaaaaannaaannnnnnannnnnnnnnnnnnnnnnnnnnnnnnnnnnnnnnnnnnnnnnngggcggccgctccctatagngagtcgtattaagcttaattagctgancttggactcctgttgananatccagnaatgacctcaaaactccatctggatttgttcaaaacgctcggttgccnccgggggttttttattggngaaaatccaagctagcttgggngaaattttcnggagcntaaggnaanctaaaatgganaaaaaaatccctggganaaacccccggttgaaaatatcccaanggnnntcnnaaaaaaaanttttgaaggnntttcanncagttgcncanggacctaaaaccnaaaccgttnngctggnaaattacgncctttttnaaaaacnngaaaaaaaanaanccnnantttttncnggnctttnnttcattttttgccccncngaanaangnncccccgnaattttnatggnaanaaaaaagggnancgggggaaaggnaaanntccccttttaaccnttttcngaaaaaaaaaaatttttncccctggaagaaacnaaaattttggggtttttnaaatttcnaaaggggggtttggaaaccccnttccaggntttnnaaatttttncccccccnggggnttnccttttanangnnanaaanttccccctntn

SEQ ID NO: 406 - DNA, 1442 bp, Homo Sapiens
  misc_feature (828)..(828): n is a, c, g, or t
  misc_feature (850)..(850): n is a, c, g, or t
  misc_feature (853)..(853): n is a, c, g, or t
  misc_feature (936)..(936): n is a, c, g, or t
  misc_feature (943)..(943): n is a, c, g, or t
  misc_feature (946)..(946): n is a, c, g, or t
  misc_feature (982)..(982): n is a, c, g, or t
  misc_feature (998)..(998): n is a, c, g, or t
  misc_feature (1000)..(1000): n is a, c, g, or t
  misc_feature (1006)..(1006): n is a, c, g, or t
  misc_feature (1021)..(1021): n is a, c, g, or t
  misc_feature (1029)..(1029): n is a, c, g, or t
  misc_feature (1031)..(1031): n is a, c, g, or t
  misc_feature (1036)..(1036): n is a, c, g, or t
  misc_feature (1039)..(1039): n is a, c, g, or t
  misc_feature (1045)..(1045): n is a, c, g, or t
  misc_feature (1053)..(1053): n is a, c, g, or t
  misc_feature (1057)..(1057): n is a, c, g, or t
  misc_feature (1068)..(1069): n is a, c, g, or t
  misc_feature (1072)..(1072): n is a, c, g, or t
  misc_feature (1088)..(1089): n is a, c, g, or t
  misc_feature (1091)..(1091): n is a, c, g, or t
  misc_feature (1101)..(1102): n is a, c, g, or t
  misc_feature (1111)..(1111): n is a, c, g, or t
  misc_feature (1113)..(1113): n is a, c, g, or t
  misc_feature (1116)..(1117): n is a, c, g, or t
  misc_feature (1119)..(1119): n is a, c, g, or t
  misc_feature (1123)..(1123): n is a, c, g, or t
  misc_feature (1127)..(1127): n is a, c, g, or t
  misc_feature (1141)..(1141): n is a, c, g, or t
  misc_feature (1145)..(1145): n is a, c, g, or t
  misc_feature (1149)..(1149): n is a, c, g, or t
  misc_feature (1152)..(1152): n is a, c, g, or t
  misc_feature (1154)..(1155): n is a, c, g, or t
  misc_feature (1157)..(1158): n is a, c, g, or t
  misc_feature (1162)..(1163): n is a, c, g, or t
  misc_feature (1166)..(1167): n is a, c, g, or t
  misc_feature (1172)..(1173): n is a, c, g, or t
  misc_feature (1176)..(1177): n is a, c, g, or t
  misc_feature (1182)..(1182): n is a, c, g, or t
  misc_feature (1189)..(1189): n is a, c, g, or t
  misc_feature (1195)..(1195): n is a, c, g, or t
  misc_feature (1201)..(1201): n is a, c, g, or t
  misc_feature (1203)..(1203): n is a, c, g, or t
  misc_feature (1208)..(1208): n is a, c, g, or t
  misc_feature (1211)..(1211): n is a, c, g, or t
  misc_feature (1217)..(1218): n is a, c, g, or t
  misc_feature (1220)..(1220): n is a, c, g, or t
  misc_feature (1222)..(1222): n is a, c, g, or t
  misc_feature (1225)..(1225): n is a, c, g, or t
  misc_feature (1227)..(1228): n is a, c, g, or t
  misc_feature (1231)..(1232): n is a, c, g, or t
  misc_feature (1235)..(1235): n is a, c, g, or t
  misc_feature (1237)..(1238): n is a, c, g, or t
  misc_feature (1240)..(1241): n is a, c, g, or t
  misc_feature (1245)..(1245): n is a, c, g, or t
  misc_feature (1247)..(1247): n is a, c, g, or t
  misc_feature (1249)..(1249): n is a, c, g, or t
  misc_feature (1255)..(1255): n is a, c, g, or t
  misc_feature (1258)..(1258): n is a, c, g, or t
  misc_feature (1260)..(1260): n is a, c, g, or t
  misc_feature (1267)..(1267): n is a, c, g, or t
  misc_feature (1294)..(1294): n is a, c, g, or t
  misc_feature (1303)..(1303): n is a, c, g, or t
  misc_feature (1314)..(1314): n is a, c, g, or t
  misc_feature (1333)..(1334): n is a, c, g, or t
  misc_feature (1339)..(1339): n is a, c, g, or t
  misc_feature (1342)..(1343): n is a, c, g, or t
  misc_feature (1345)..(1345): n is a, c, g, or t
  misc_feature (1347)..(1348): n is a, c, g, or t
  misc_feature (1353)..(1354): n is a, c, g, or t
  misc_feature (1356)..(1357): n is a, c, g, or t
  misc_feature (1362)..(1362): n is a, c, g, or t
  misc_feature (1364)..(1364): n is a, c, g, or t
  misc_feature (1376)..(1376): n is a, c, g, or t
  misc_feature (1378)..(1378): n is a, c, g, or t
  misc_feature (1382)..(1382): n is a, c, g, or t
  misc_feature (1384)..(1384): n is a, c, g, or t
  misc_feature (1387)..(1387): n is a, c, g, or t
  misc_feature (1390)..(1390): n is a, c, g, or t
  misc_feature (1393)..(1393): n is a, c, g, or t
  misc_feature (1396)..(1396): n is a, c, g, or t
  misc_feature (1399)..(1399): n is a, c, g, or t
  misc_feature (1410)..(1410): n is a, c, g, or t
  misc_feature (1420)..(1420): n is a, c, g, or t
  misc_feature (1422)..(1424): n is a, c, g, or t
  misc_feature (1435)..(1436): n is a, c, g, or t
tagagaaattactatgagaggatcgcatcaccatcaccatcacggatcctatttaggtgacactatagaatcgtcgacccacgcgtccgagaagattgagaaacaatatgatgcagatctggagcagatcctgatccagtggatcaccacccagtgccgaaaggatgtgggccggccccagcctggacgcgagaacttccagaactggctcaaggatggcacggtgctatgtgagctcattaatgcactgtaccccgaggggcaggccccagtaaagaagatccaggcctccaccatggccttcaagcagatggagcagatctctcagttcctgcaagcagctgagcgctatggcattaacaccactgacatcttccaaactgtggacctctgggaaggaaagaacatggcctgtgtgcagcggacgctgatgaatctgggtgggctggcagtagcccgagatgatgggctcttctctggggatcccaactggttccctaagaaatccaaggagaatcctcggaacttctcggataaccagctgcaagagggcaagaacgtgatcgggttacagatgggcaccaaccgcggggcgtctcaggcaggcatgactggctacgggatgccacgccagatcctctgatcccaccccaggccttgcccctgccctcccacgaatggttaatatatatgtagatatatattttagcagtgacattcccagagagccccagagctctcaagctcctttctgtcagggtggggggttcagcctgtcctgtcacctctgaggtgcctgctggcatccctctccccccatgcttaacnaatacattccctttccccatanccnatcaaaaactggaccaacctggcctcttcctttcccctgggaaccaaaatttaagggcctcaattccctcaccgcccatgccntgaccantcnggtctctcccttcttccccctggcctggtttgtccntaaactctgtgtcctncngttcantccatggctgggaanccctgaancngcccnccncccttntaaagctngacnggcctttcctnnaanaaaaatgctttccccnnanctggggctgnnggaacattntnttnnangaanaacnttgtgaattttttncccnaccnaantnntnntagnngtnnccccnnatnnggggnccctctnttgggnggcccncnggganccntttccnntncnctncnnggnnaangnngnntaangnanaaaagnagncnccctccntttctggttttaaaaaatatttttttntaaaaaatnttcttttaagnaaaaaaaaaaaaaaaaggnnccccntanngngnnaattnntnnacttncncttaaaaaaaancncccntnttntanctnccncgntttttaaaccnttctattttnannnaaaaatcccannttcttc

SEQ ID NO: 407 - DNA, 1432 bp, Homo Sapiens
  misc_feature (1)..(1): n is a, c, g, or t
  misc_feature (873)..(873): n is a, c, g, or t
  misc_feature (932)..(932): n is a, c, g, or t
  misc_feature (946)..(946): n is a, c, g, or t
  misc_feature (976)..(976): n is a, c, g, or t
  misc_feature (996)..(996): n is a, c, g, or t
  misc_feature (1005)..(1005): n is a, c, g, or t
  misc_feature (1029)..(1030): n is a, c, g, or t
  misc_feature (1035)..(1036): n is a, c, g, or t
  misc_feature (1053)..(1053): n is a, c, g, or t
  misc_feature (1064)..(1064): n is a, c, g, or t
  misc_feature (1069)..(1070): n is a, c, g, or t
  misc_feature (1086)..(1086): n is a, c, g, or t
  misc_feature (1090)..(1090): n is a, c, g, or t
  misc_feature (1100)..(1100): n is a, c, g, or t
  misc_feature (1108)..(1108): n is a, c, g, or t
  misc_feature (1117)..(1117): n is a, c, g, or t
  misc_feature (1120)..(1120): n is a, c, g, or t
  misc_feature (1123)..(1123): n is a, c, g, or t
  misc_feature (1126)..(1126): n is a, c, g, or t
  misc_feature (1128)..(1128): n is a, c, g, or t
  misc_feature (1132)..(1133): n is a, c, g, or t
  misc_feature (1137)..(1137): n is a, c, g, or t
  misc_feature (1147)..(1147): n is a, c, g, or t
  misc_feature (1152)..(1152): n is a, c, g, or t
  misc_feature (1156)..(1156): n is a, c, g, or t
  misc_feature (1158)..(1158): n is a, c, g, or t
  misc_feature (1179)..(1180): n is a, c, g, or t
  misc_feature (1196)..(1196): n is a, c, g, or t
  misc_feature (1201)..(1201): n is a, c, g, or t
  misc_feature (1206)..(1207): n is a, c, g, or t
  misc_feature (1210)..(1210): n is a, c, g, or t
  misc_feature (1224)..(1224): n is a, c, g, or t
  misc_feature (1229)..(1229): n is a, c, g, or t
  misc_feature (1240)..(1240): n is a, c, g, or t
  misc_feature (1243)..(1243): n is a, c, g, or t
  misc_feature (1246)..(1246): n is a, c, g, or t
  misc_feature (1249)..(1250): n is a, c, g, or t
  misc_feature (1252)..(1252): n is a, c, g, or t
  misc_feature (1259)..(1260): n is a, c, g, or t
  misc_feature (1264)..(1264): n is a, c, g, or t
  misc_feature (1267)..(1268): n is a, c, g, or t
  misc_feature (1270)..(1270): n is a, c, g, or t
  misc_feature (1274)..(1274): n is a, c, g, or t
  misc_feature (1277)..(1278): n is a, c, g, or t
  misc_feature (1286)..(1286): n is a, c, g, or t
  misc_feature (1292)..(1292): n is a, c, g, or t
  misc_feature (1294)..(1294): n is a, c, g, or t
  misc_feature (1300)..(1301): n is a, c, g, or t
  misc_feature (1327)..(1327): n is a, c, g, or t
  misc_feature (1339)..(1339): n is a, c, g, or t
  misc_feature (1341)..(1341): n is a, c, g, or t
  misc_feature (1348)..(1349): n is a, c, g, or t
  misc_feature (1355)..(1358): n is a, c, g, or t
  misc_feature (1360)..(1362): n is a, c, g, or t
  misc_feature (1369)..(1369): n is a, c, g, or t
  misc_feature (1375)..(1375): n is a, c, g, or t
  misc_feature (1377)..(1377): n is a, c, g, or t
  misc_feature (1380)..(1382): n is a, c, g, or t
  misc_feature (1384)..(1386): n is a, c, g, or t
  misc_feature (1388)..(1390): n is a, c, g, or t
  misc_feature (1392)..(1395): n is a, c, g, or t
  misc_feature (1398)..(1399): n is a, c, g, or t
  misc_feature (1404)..(1404): n is a, c, g, or t
  misc_feature (1410)..(1411): n is a, c, g, or t
  misc_feature (1421)..(1421): n is a, c, g, or t
  misc_feature (1423)..(1424): n is a, c, g, or t
  misc_feature (1427)..(1427): n is a, c, g, or t
nttagagaaattactatgagaggatcgcatcaccatcaccatcacggatcctatttaggtgacactatagaatcgtcgacccacgcgtccggtgagaaccgagccacagtcatgtttcctacatcagcctcctgctcaggggtttgtacagagaccactgccagccctctaggtggtccctgcaaagagagtcccagcccccaaggctccaaatggacagggcaccatgttgaccccttcgtcggcctccagttcgccgactgtaacatgtttcatccagttcaggacgtttatttatttccaacttgcatacaaaacatactgagaaactaaaaccatcgttaaaagtgaagacacgttgagacaggtatctcgacctgccaagtataaagctaaagctgagttcataaaaagggatgatttggccgacggtcatctgccagattctgatgatgattcagaagtcagtgtggaagaagatcagagggagaggcaggcgctctttgacttatcaagctgctccctgaggcccaaaagcttcaagtgtcagacttgtaaaaagtcatatatagggaagtggggactggcccagcattttaaacttaatccaggccatggccagctggaccctgagatggtgctatctgagaaagccaatgggagcaccctccgggggtgcacagaggaaaggacgctcagcctgaccttcccggggctgtccgtgccagcggctccgcgtgagggaggggcccgctcctgcttggtgagagagtcagcacgcagtggcctgcagtctcactctgtggcccaggctggagtacagtggcgcagtctgagttcactgcagcctccacctcccaggttcaagagatnctcctgcctcaacctcccgagtagctgggactacagtcacgtaccaccagttgaaaaanatcatctaagcaangccttttttccagctacctataaggaattngaaagtcccaaaaaatggtnaaaaaatgnggccaagattacctcaataaattnnggccnngggttctcagaaaaccntggaaaaaaanaatgnntcttccggggcttccncgtnccctaaggcngggtggcnttcaaaaanccnttntcnanagtnnaacnaaaaaaaccnttggncccnanaccctggagaaaaacctgaannaaaggccttcaaaagnccccnaaatnnaantattcccccccccnccttngggaaaaaccngcngcnaanncnccttttnngggnaanngnaaanttnngggggggnaatccngntaaaannggccccaaaaattttccccccctttnggaaaaaacccngnttttggnntttttnnnntnnnaaaaatncccaantnatnnngnnncnnncnnnntcnnaaaantttttnnaaggggtttntnnggnaaaaa

SEQ ID NO: 408 - DNA, 1429 bp, Homo Sapiens
  misc_feature (603)..(603): n is a, c, g, or t
  misc_feature (848)..(848): n is a, c, g, or t
  misc_feature (888)..(889): n is a, c, g, or t
  misc_feature (902)..(902): n is a, c, g, or t
  misc_feature (934)..(934): n is a, c, g, or t
  misc_feature (936)..(936): n is a, c, g, or t
  misc_feature (947)..(948): n is a, c, g, or t
  misc_feature (951)..(951): n is a, c, g, or t
  misc_feature (979)..(979): n is a, c, g, or t
  misc_feature (1011)..(1011): n is a, c, g, or t
  misc_feature (1016)..(1017): n is a, c, g, or t
  misc_feature (1032)..(1032): n is a, c, g, or t
  misc_feature (1041)..(1041): n is a, c, g, or t
  misc_feature (1044)..(1044): n is a, c, g, or t
  misc_feature (1046)..(1046): n is a, c, g, or t
  misc_feature (1055)..(1055): n is a, c, g, or t
  misc_feature (1058)..(1058): n is a, c, g, or t
  misc_feature (1070)..(1070): n is a, c, g, or t
  misc_feature (1080)..(1080): n is a, c, g, or t
  misc_feature (1083)..(1083): n is a, c, g, or t
  misc_feature (1091)..(1091): n is a, c, g, or t
  misc_feature (1098)..(1098): n is a, c, g, or t
  misc_feature (1102)..(1102): n is a, c, g, or t
  misc_feature (1109)..(1110): n is a, c, g, or t
  misc_feature (1113)..(1113): n is a, c, g, or t
  misc_feature (1118)..(1118): n is a, c, g, or t
  misc_feature (1120)..(1120): n is a, c, g, or t
  misc_feature (1127)..(1127): n is a, c, g, or t
  misc_feature (1132)..(1132): n is a, c, g, or t
  misc_feature (1136)..(1136): n is a, c, g, or t
  misc_feature (1138)..(1138): n is a, c, g, or t
  misc_feature (1142)..(1142): n is a, c, g, or t
  misc_feature (1149)..(1150): n is a, c, g, or t
  misc_feature (1152)..(1153): n is a, c, g, or t
  misc_feature (1166)..(1166): n is a, c, g, or t
  misc_feature (1169)..(1169): n is a, c, g, or t
  misc_feature (1171)..(1171): n is a, c, g, or t
  misc_feature (1174)..(1174): n is a, c, g, or t
  misc_feature (1177)..(1177): n is a, c, g, or t
  misc_feature (1198)..(1198): n is a, c, g, or t
  misc_feature (1213)..(1213): n is a, c, g, or t
  misc_feature (1216)..(1217): n is a, c, g, or t
  misc_feature (1220)..(1220): n is a, c, g, or t
  misc_feature (1224)..(1224): n is a, c, g, or t
  misc_feature (1226)..(1226): n is a, c, g, or t
  misc_feature (1229)..(1229): n is a, c, g, or t
  misc_feature (1231)..(1231): n is a, c, g, or t
  misc_feature (1237)..(1237): n is a, c, g, or t
  misc_feature (1241)..(1242): n is a, c, g, or t
  misc_feature (1248)..(1248): n is a, c, g, or t
  misc_feature (1251)..(1253): n is a, c, g, or t
  misc_feature (1258)..(1259): n is a, c, g, or t
  misc_feature (1265)..(1265): n is a, c, g, or t
  misc_feature (1268)..(1268): n is a, c, g, or t
  misc_feature (1274)..(1274): n is a, c, g, or t
  misc_feature (1277)..(1278): n is a, c, g, or t
  misc_feature (1280)..(1281): n is a, c, g, or t
  misc_feature (1283)..(1284): n is a, c, g, or t
  misc_feature (1286)..(1286): n is a, c, g, or t
  misc_feature (1291)..(1291): n is a, c, g, or t
  misc_feature (1296)..(1296): n is a, c, g, or t
  misc_feature (1300)..(1300): n is a, c, g, or t
  misc_feature (1307)..(1307): n is a, c, g, or t
  misc_feature (1310)..(1310): n is a, c, g, or t
  misc_feature (1320)..(1320): n is a, c, g, or t
  misc_feature (1322)..(1323): n is a, c, g, or t
  misc_feature (1328)..(1328): n is a, c, g, or t
  misc_feature (1331)..(1331): n is a, c, g, or t
  misc_feature (1335)..(1335): n is a, c, g, or t
  misc_feature (1337)..(1337): n is a, c, g, or t
  misc_feature (1340)..(1341): n is a, c, g, or t
  misc_feature (1353)..(1353): n is a, c, g, or t
  misc_feature (1360)..(1360): n is a, c, g, or t
  misc_feature (1364)..(1364): n is a, c, g, or t
  misc_feature (1367)..(1367): n is a, c, g, or t
  misc_feature (1384)..(1384): n is a, c, g, or t
  misc_feature (1387)..(1387): n is a, c, g, or t
  misc_feature (1392)..(1393): n is a, c, g, or t
  misc_feature (1398)..(1398): n is a, c, g, or t
  misc_feature (1400)..(1400): n is a, c, g, or t
  misc_feature (1406)..(1407): n is a, c, g, or t
  misc_feature (1422)..(1422): n is a, c, g, or t
  misc_feature (1427)..(1428): n is a, c, g, or t
atagagagaattactatgagaggatcgcatcaccatcaccatcacggatcctatttaggtgacactatagaatcgtcgacccacgcgtccgtccccaatgatgaagacgacccagggcaaggaatccagcagcagcacagcagtgcagccgcggctgcccagcagggcggctacgagatccccgcgcggctgcggacgctccacaacctggtgatccagtacgcctcgcaggggcgctacgaggtagctgtgcccctctgcaagcaggccctggaggacctggagaagacttcaggacacgaccacccggacgtggccaccatgctcaacatcctggccttggtgtacagggatcagaataaatacaaagatgcagctaacctactgaatgatgccttggctattcgtgagaaaactttgggcaaagatcatcctgcggtggcggcgactttgaataaccttgcagtcctttatggtaaaagagggaagtacaaagaagcagagccgttgtgtaaaagagctctggaaatccgagaaaaggttttggggaaggatcaccccgatgttgccaagcagttaaataacttggccttactgtgccanaaccagggcaagtatgaagaagtagaatattattatcaaagagccctcgagatctaccagacaaaactgggacctgatgaccccaacgtggctaagacgaaaaataacctggcatcctgctatttgaaacaaggaaagttcaagcaagcagaaacactgtacaaagagattctcactcgtgcacatgaaagggagtttggttctgtagatgatgaaaataaaccccatctggatgcatgctgaanaaagagaagaatgcaaaggaaaagccaaaaggatgggacnntcttttggaaaanatggcggctggtacaaagcctgcaaagttganantccaactgttnncancactctaaaaaaaccttggggcactttncagaacgtccaaggcaaattttaaacctgccnaaacnnttaaaaaaaccttgntatgaagtntcntnaacagggtnttnaaaatgttcctnaaacaaaggntgncaaaattnctcaatnaccntgaaaanntgnaaaancnccagaancctgnaaancncaantggaacnngnnaaatacaaaaggnccntnaanganggaaaaaataagaaataaacncggggggtttataanttnntcncccntngcnancccctnaatnnactttnccnnnaaaanngggccnccnaattcnttnntnncnngngcccnttgtnaaancccaaanttnaaaacccctntnngaagnctntttngnctnntctttgggggcntatttantaanttnccaaatttaaaaaattnaanccttnnacctnanaaaatnnttctttaaatatacncagtnng

SEQ ID NO: 409 - DNA, 1326 bp, Homo Sapiens
  misc_feature (916)..(916): n is a, c, g, or t
  misc_feature (918)..(918): n is a, c, g, or t
  misc_feature (989)..(989): n is a, c, g, or t
  misc_feature (1001)..(1001): n is a, c, g, or t
  misc_feature (1016)..(1016): n is a, c, g, or t
  misc_feature (1024)..(1024): n is a, c, g, or t
  misc_feature (1035)..(1035): n is a, c, g, or t
  misc_feature (1038)..(1039): n is a, c, g, or t
  misc_feature (1046)..(1046): n is a, c, g, or t
  misc_feature (1052)..(1052): n is a, c, g, or t
  misc_feature (1054)..(1054): n is a, c, g, or t
  misc_feature (1077)..(1077): n is a, c, g, or t
  misc_feature (1090)..(1090): n is a, c, g, or t
  misc_feature (1095)..(1095): n is a, c, g, or t
  misc_feature (1097)..(1097): n is a, c, g, or t
  misc_feature (1104)..(1104): n is a, c, g, or t
  misc_feature (1106)..(1106): n is a, c, g, or t
  misc_feature (1114)..(1115): n is a, c, g, or t
  misc_feature (1117)..(1118): n is a, c, g, or t
  misc_feature (1120)..(1120): n is a, c, g, or t
  misc_feature (1134)..(1134): n is a, c, g, or t
  misc_feature (1152)..(1152): n is a, c, g, or t
  misc_feature (1160)..(1161): n is a, c, g, or t
  misc_feature (1163)..(1163): n is a, c, g, or t
  misc_feature (1166)..(1166): n is a, c, g, or t
  misc_feature (1168)..(1168): n is a, c, g, or t
  misc_feature (1172)..(1172): n is a, c, g, or t
  misc_feature (1176)..(1178): n is a, c, g, or t
  misc_feature (1186)..(1186): n is a, c, g, or t
  misc_feature (1190)..(1191): n is a, c, g, or t
  misc_feature (1202)..(1204): n is a, c, g, or t
  misc_feature (1220)..(1220): n is a, c, g, or t
  misc_feature (1234)..(1234): n is a, c, g, or t
  misc_feature (1240)..(1240): n is a, c, g, or t
  misc_feature (1245)..(1246): n is a, c, g, or t
  misc_feature (1249)..(1250): n is a, c, g, or t
  misc_feature (1258)..(1258): n is a, c, g, or t
  misc_feature (1266)..(1267): n is a, c, g, or t
  misc_feature (1272)..(1272): n is a, c, g, or t
  misc_feature (1274)..(1275): n is a, c, g, or t
  misc_feature (1279)..(1279): n is a, c, g, or t
  misc_feature (1282)..(1283): n is a, c, g, or t
  misc_feature (1289)..(1290): n is a, c, g, or t
  misc_feature (1295)..(1300): n is a, c, g, or t
  misc_feature (1302)..(1302): n is a, c, g, or t
  misc_feature (1307)..(1309): n is a, c, g, or t
  misc_feature (1313)..(1318): n is a, c, g, or t
  misc_feature (1320)..(1326): n is a, c, g, or t
attagagaaattactatgagaggatcgcatcaccatcaccatcacggatcctatttaggtgacactatagaatcgtcgactggacagttaaccgattcagtgccagatttcgcagtatctacaaggtccggctacctctgccgccacattaacaaaaaacctcgggcttccagcctgcgcgacagcaaacataagaaggggtgtttttatgtcatccgatattaagatcaaagtgcaaagctttggtcgtttcctcagcaacatggtgatgccaaatatcggcgcgtttatcgcgtggggtatcatcaccgcgttatttattccaacagggtggttaccgaacgagacgctggcgaagctggtcgggccgatgatcacttatctcctgccgctgctgatcggttataccggtggtaagctggtaggcggcgaacgtggcggcgtagtcggtgccatcaccaccatgggcgttatcgtcggcgcagacatgccgatgttcctcggttctatgattgcaggtccgctgggcggctggtgcattaagcacttcgaccgctgggtagacggtaagatcaaatccggttttgagatgctggtgaataacttctccgcaggcatcatcgggatgatcctcgctattctggcattcctcggcattggcccgattgttgaagccctgtccaaaatgctggctgcgggcgttaacttcatggttgtccatgacatgctgccgctggcgtctatctttgttgaaccggcgaaaatcctgttcctcaacaacgccattaaccacggtatcttctcgccgctgggtattcagcagtcccatgaactgggtaaatcaatcttcttcctgattgaagctaacccaggtccaggtatgggcgtgctgctggcgtacatgttctttggtcgngnaacgctaaaagtctgcgggcggggcggcaatcatccacttcctggggggtatccccgaaatctacttcccngtatgtgctgangaatccccgtctgantctcccantcatcctcggnggnngactggnggttcncnctgaaatcctggggggggtctgnttctccggcatcnccggntntatcctngntgaatggnnannanccaaaagggcttanttcctaaaatcccggggngggggggnnanggngncccncccnnnccccccantttnngaaaccccaannnaaaaaaaaaaatttancccccccccctttngggaanaaaannatnnaaggcccncccccttnnggggngnnaaanccnncccccnnaaaannnnnntnccccnnngttnnnnnngnnnnnnn

SEQ ID NO: 410 - DNA, 1387 bp, Homo Sapiens
  misc_feature (453)..(453): n is a, c, g, or t
  misc_feature (826)..(826): n is a, c, g, or t
  misc_feature (870)..(870): n is a, c, g, or t
  misc_feature (878)..(878): n is a, c, g, or t
  misc_feature (891)..(891): n is a, c, g, or t
  misc_feature (908)..(908): n is a, c, g, or t
  misc_feature (937)..(937): n is a, c, g, or t
  misc_feature (961)..(961): n is a, c, g, or t
  misc_feature (964)..(964): n is a, c, g, or t
  misc_feature (971)..(971): n is a, c, g, or t
  misc_feature (981)..(981): n is a, c, g, or t
  misc_feature (987)..(987): n is a, c, g, or t
  misc_feature (994)..(994): n is a, c, g, or t
  misc_feature (999)..(999): n is a, c, g, or t
  misc_feature (1017)..(1017): n is a, c, g, or t
  misc_feature (1023)..(1024): n is a, c, g, or t
  misc_feature (1032)..(1032): n is a, c, g, or t
  misc_feature (1048)..(1048): n is a, c, g, or t
  misc_feature (1050)..(1050): n is a, c, g, or t
  misc_feature (1053)..(1054): n is a, c, g, or t
  misc_feature (1056)..(1056): n is a, c, g, or t
  misc_feature (1061)..(1061): n is a, c, g, or t
  misc_feature (1063)..(1063): n is a, c, g, or t
  misc_feature (1065)..(1065): n is a, c, g, or t
  misc_feature (1070)..(1070): n is a, c, g, or t
  misc_feature (1075)..(1075): n is a, c, g, or t
  misc_feature (1085)..(1085): n is a, c, g, or t
  misc_feature (1088)..(1088): n is a, c, g, or t
  misc_feature (1093)..(1093): n is a, c, g, or t
  misc_feature (1095)..(1096): n is a, c, g, or t
  misc_feature (1105)..(1105): n is a, c, g, or t
  misc_feature (1111)..(1111): n is a, c, g, or t
  misc_feature (1118)..(1118): n is a, c, g, or t
  misc_feature (1125)..(1125): n is a, c, g, or t
  misc_feature (1129)..(1130): n is a, c, g, or t
  misc_feature (1137)..(1137): n is a, c, g, or t
  misc_feature (1140)..(1140): n is a, c, g, or t
  misc_feature (1148)..(1148): n is a, c, g, or t
  misc_feature (1152)..(1153): n is a, c, g, or t
  misc_feature (1161)..(1161): n is a, c, g, or t
  misc_feature (1163)..(1163): n is a, c, g, or t
  misc_feature (1165)..(1165): n is a, c, g, or t
  misc_feature (1177)..(1177): n is a, c, g, or t
  misc_feature (1181)..(1181): n is a, c, g, or t
  misc_feature (1185)..(1185): n is a, c, g, or t
  misc_feature (1196)..(1196): n is a, c, g, or t
  misc_feature (1203)..(1205): n is a, c, g, or t
  misc_feature (1213)..(1213): n is a, c, g, or t
  misc_feature (1227)..(1229): n is a, c, g, or t
  misc_feature (1233)..(1233): n is a, c, g, or t
  misc_feature (1235)..(1235): n is a, c, g, or t
  misc_feature (1239)..(1240): n is a, c, g, or t
  misc_feature (1245)..(1245): n is a, c, g, or t
  misc_feature (1247)..(1248): n is a, c, g, or t
  misc_feature (1267)..(1267): n is a, c, g, or t
  misc_feature (1271)..(1276): n is a, c, g, or t
  misc_feature (1281)..(1281): n is a, c, g, or t
  misc_feature (1283)..(1284): n is a, c, g, or t
  misc_feature (1293)..(1293): n is a, c, g, or t
  misc_feature (1295)..(1296): n is a, c, g, or t
  misc_feature (1311)..(1311): n is a, c, g, or t
  misc_feature (1317)..(1317): n is a, c, g, or t
  misc_feature (1321)..(1321): n is a, c, g, or t
  misc_feature (1326)..(1327): n is a, c, g, or t
  misc_feature (1329)..(1329): n is a, c, g, or t
  misc_feature (1331)..(1332): n is a, c, g, or t
  misc_feature (1335)..(1336): n is a, c, g, or t
  misc_feature (1338)..(1342): n is a, c, g, or t
  misc_feature (1375)..(1375): n is a, c, g, or t
  misc_feature (1379)..(1379): n is a, c, g, or t
  misc_feature (1386)..(1386): n is a, c, g, or t
caatagagaaattaactatgagaggatcgcatcaccatcaccatcacggatcctatttaggtgacactatagaatcgtcgacccacgcgtccggtagttttctctgcgcgtgtgcgttttccctcctcccccgccctcagggtccacggccaccatggcgtattaggggcagcagtgcctgcggcagcattggcctttgcagcggcggcagcagcaccaggctctgcagcggcaacccccagcggcttaagccatggcgcttctcacggcattcagcagcagcgttgctgtaaccgacaaagacaccttcgaattaagcacattcctcgattccagcaaagcaccgcaacatgaccgaaatgagcttcctgagcagcgaggtgttggtgggggacttgatgtcccccttcgacccgtcgggtttgggggctgaagaaagcctaggtctcttanatgattacctggaggtggccaagcacttcaaacctcatgggttctccagcgacaaggctaaggcgggctcctccgaatggctggctgtggatgggttggtcagtccctccaacaacagcaaggaggatgccttctccgggacagattggatgttggagaaaatggatttgaaggagttcgacttggatgccctgttgggtatagatgacctggaaaccatgccagatgaccttctgaccacgttggatgacacttgtgatctctttgcccccctagtccaggagactaataagcagcccccccagacggtgaacccaattggccatctcccaaaaagtttaaacaaaacccgaccaggttgcccccttcaccnttcttacaacctcttccccctttcccccaggggtcctgtcctcnactccaanatcattcctttantttaaaagctggggcantgaagtggatatcactgaaaggaaatagnaagccaagactacactgctttacnttngccatgnatcccctcantgcaanaaaggangaaanaaccccctttcaaaaaangaaaannggcaattngtataaccccaaaatncntanntnggggncncntcaanaaaancccttctaanaanggggntnnccaaaaaanaacccnccaatcnccaaggnttcnntgggggnttngccctccnaaannttaaaaancncntggaaaaaaaangtancacnaaaataaaggngaaaaannngaaaaaancttaaaaaaagggnnnaaananaaannccccntnncccccccaaaaaaaagggnaaannnnnnttttngnnaagcaaaantnnaaaaaaaaaaaatcnaaaaangggnttccnncnannaannannnnnaaattaaaaaaacccaggagggaaaaaagcccncttnaaaatcng

SEQ ID NO: 411 - DNA, 1402 bp, Homo Sapiens
  misc_feature (690)..(690): n is a, c, g, or t
  misc_feature (864)..(864): n is a, c, g, or t
  misc_feature (886)..(886): n is a, c, g, or t
  misc_feature (904)..(904): n is a, c, g, or t
  misc_feature (907)..(907): n is a, c, g, or t
  misc_feature (921)..(921): n is a, c, g, or t
  misc_feature (940)..(940): n is a, c, g, or t
  misc_feature (952)..(952): n is a, c, g, or t
  misc_feature (968)..(968): n is a, c, g, or t
  misc_feature (975)..(975): n is a, c, g, or t
  misc_feature (998)..(998): n is a, c, g, or t
  misc_feature (1008)..(1008): n is a, c, g, or t
  misc_feature (1014)..(1014): n is a, c, g, or t
  misc_feature (1019)..(1019): n is a, c, g, or t
  misc_feature (1021)..(1021): n is a, c, g, or t
  misc_feature (1035)..(1035): n is a, c, g, or t
  misc_feature (1037)..(1037): n is a, c, g, or t
  misc_feature (1041)..(1042): n is a, c, g, or t
  misc_feature (1044)..(1044): n is a, c, g, or t
  misc_feature (1061)..(1061): n is a, c, g, or t
  misc_feature (1064)..(1064): n is a, c, g, or t
  misc_feature (1072)..(1073): n is a, c, g, or t
  misc_feature (1078)..(1078): n is a, c, g, or t
  misc_feature (1080)..(1080): n is a, c, g, or t
  misc_feature (1083)..(1083): n is a, c, g, or t
  misc_feature (1091)..(1092): n is a, c, g, or t
  misc_feature (1095)..(1096): n is a, c, g, or t
  misc_feature (1105)..(1105): n is a, c, g, or t
  misc_feature (1116)..(1116): n is a, c, g, or t
  misc_feature (1118)..(1118): n is a, c, g, or t
  misc_feature (1122)..(1122): n is a, c, g, or t
  misc_feature (1135)..(1135): n is a, c, g, or t
  misc_feature (1141)..(1143): n is a, c, g, or t
  misc_feature (1148)..(1148): n is a, c, g, or t
  misc_feature (1150)..(1150): n is a, c, g, or t
  misc_feature (1152)..(1152): n is a, c, g, or t
  misc_feature (1158)..(1158): n is a, c, g, or t
  misc_feature (1170)..(1170): n is a, c, g, or t
  misc_feature (1175)..(1175): n is a, c, g, or t
  misc_feature (1178)..(1178): n is a, c, g, or t
  misc_feature (1191)..(1191): n is a, c, g, or t
  misc_feature (1195)..(1195): n is a, c, g, or t
  misc_feature (1197)..(1197): n is a, c, g, or t
  misc_feature (1205)..(1205): n is a, c, g, or t
  misc_feature (1212)..(1212): n is a, c, g, or t
  misc_feature (1231)..(1231): n is a, c, g, or t
  misc_feature (1241)..(1242): n is a, c, g, or t
  misc_feature (1253)..(1254): n is a, c, g, or t
  misc_feature (1265)..(1267): n is a, c, g, or t
  misc_feature (1281)..(1281): n is a, c, g, or t
  misc_feature (1284)..(1284): n is a, c, g, or t
  misc_feature (1290)..(1291): n is a, c, g, or t
  misc_feature (1293)..(1293): n is a, c, g, or t
  misc_feature (1299)..(1299): n is a, c, g, or t
  misc_feature (1305)..(1306): n is a, c, g, or t
  misc_feature (1313)..(1313): n is a, c, g, or t
  misc_feature (1324)..(1324): n is a, c, g, or t
  misc_feature (1346)..(1346): n is a, c, g, or t
  misc_feature (1376)..(1377): n is a, c, g, or t
  misc_feature (1379)..(1383): n is a, c, g, or t
  misc_feature (1395)..(1395): n is a, c, g, or t
  misc_feature (1400)..(1400): n is a, c, g, or t
caatagagaaattaactatgagaggatcgcatcaccatcaccatcacggatcctatttaggtgacactatagaatcgtcgacccacgcgtccgccgcccacagatgtagttttctctgcgcgtgtgcgttttccctcctcccccgccctcagggtccacggccaccatggcgtattaggggcagcagtgcctgcggcagcattggcctttgcagcggcggcagcagcaccaggctctgcagcggcaacccccagcggcttaagccatggcgcttctcacggcattcagcagcagcgttgctgtaaccgacaaagacaccttcgaattaagcacattcctcgattccagcaaagcaccgcaacatgaccgaaatgagcttcctgagcagcgaggtgttggtgggggacttgatgtcccccttcgacccgtcgggtttgggggctgaagaaagcctaggtctcttagatgattacctggaggtggccaagcacttcaaacctcatgggttctccagcgacaaggctaaggcgggctcctccgaatggctggctgtggatgggttggtcagtccctccaacaacagcaaggaggatgccttctccgggacagattggatgttggagaaaatggatttgaaggagttcgacttggatgccctgttgggtatagatgacctggaaaccatgccanatgaccttctgaccacgttggatgacacttgtgatctctttgcccccctagtccaggagactaataagcagcccccccagacggtgaacccaattggccatctcccagaaagtttaacaaaacccgaccaggttgcccccttcaccttcttacaacctcttcccctttccccangggtcctgtcctccaactccanatcattcctttagtttanaanctggggcagtgaantggatatcactgaaggaanataggaagccanaactacacttgcttangttgccnatgatccctccagtgcataaaangaagaaaaanaccccnttcananaatgaatagtggcntnctgnnanaaaccccaaagttcttnttnggggggtnntcttnanaanagcccccnntannaaggggctnctccaaaaagnancccncccttccccaggngttttnnnggggntntncccctnccaaaccttaanaatcntcntggaaaaaaaaangtancnccaaaatnaaagggngaaaaatgggaaaaaaatntaaaaaatgnncaaaaaaaaannccccccctttnnncccccaaaaaaaangcnaaaaanngncctttngggganncaaaccnaaaaaaaaaantcttaaaaaaagggatatctgnccaaaaaacctacccaaaatttaaaaaatnncnnnnnggaaaaaagccncttanaa

SEQ ID NO: 412 - DNA, 1305 bp, Homo Sapiens
  misc_feature (2)..(2): n is a, c, g, or t
  misc_feature (728)..(728): n is a, c, g, or t
  misc_feature (792)..(792): n is a, c, g, or t
  misc_feature (882)..(882): n is a, c, g, or t
  misc_feature (890)..(890): n is a, c, g, or t
  misc_feature (906)..(906): n is a, c, g, or t
  misc_feature (909)..(909): n is a, c, g, or t
  misc_feature (925)..(925): n is a, c, g, or t
  misc_feature (932)..(932): n is a, c, g, or t
  misc_feature (938)..(938): n is a, c, g, or t
  misc_feature (950)..(950): n is a, c, g, or t
  misc_feature (961)..(961): n is a, c, g, or t
  misc_feature (975)..(975): n is a, c, g, or t
  misc_feature (992)..(992): n is a, c, g, or t
  misc_feature (1006)..(1006): n is a, c, g, or t
  misc_feature (1012)..(1012): n is a, c, g, or t
  misc_feature (1022)..(1022): n is a, c, g, or t
  misc_feature (1046)..(1046): n is a, c, g, or t
  misc_feature (1051)..(1051): n is a, c, g, or t
  misc_feature (1055)..(1055): n is a, c, g, or t
  misc_feature (1062)..(1062): n is a, c, g, or t
  misc_feature (1067)..(1067): n is a, c, g, or t
  misc_feature (1082)..(1082): n is a, c, g, or t
  misc_feature (1086)..(1086): n is a, c, g, or t
  misc_feature (1098)..(1098): n is a, c, g, or t
  misc_feature (1100)..(1100): n is a, c, g, or t
  misc_feature (1124)..(1124): n is a, c, g, or t
  misc_feature (1130)..(1130): n is a, c, g, or t
  misc_feature (1133)..(1133): n is a, c, g, or t
  misc_feature (1142)..(1142): n is a, c, g, or t
  misc_feature (1148)..(1148): n is a, c, g, or t
  misc_feature (1157)..(1157): n is a, c, g, or t
  misc_feature (1167)..(1167): n is a, c, g, or t
  misc_feature (1173)..(1173): n is a, c, g, or t
  misc_feature (1181)..(1181): n is a, c, g, or t
  misc_feature (1185)..(1185): n is a, c, g, or t
  misc_feature (1189)..(1189): n is a, c, g, or t
  misc_feature (1195)..(1195): n is a, c, g, or t
  misc_feature (1198)..(1198): n is a, c, g, or t
  misc_feature (1200)..(1200): n is a, c, g, or t
  misc_feature (1203)..(1203): n is a, c, g, or t
  misc_feature (1209)..(1209): n is a, c, g, or t
  misc_feature (1223)..(1224): n is a, c, g, or t
  misc_feature (1228)..(1229): n is a, c, g, or t
  misc_feature (1234)..(1234): n is a, c, g, or t
  misc_feature (1238)..(1238): n is a, c, g, or t
  misc_feature (1244)..(1244): n is a, c, g, or t
  misc_feature (1258)..(1258): n is a, c, g, or t
  misc_feature (1278)..(1278): n is a, c, g, or t
  misc_feature (1284)..(1284): n is a, c, g, or t
  misc_feature (1290)..(1290): n is a, c, g, or t
  misc_feature (1292)..(1292): n is a, c, g, or t
  misc_feature (1296)..(1296): n is a, c, g, or t
cnattagagaaattactatgagaggatcgcatcaccatcaccatcacggatcctatttaggtgacactatagaatcgtcgacccacgcgtccgcaggcaccggagtgcaggttcgggggtggaatccttgggccgctgggcaagcggcgagacctggccagggccagcgagccgaggacagagggcgcacggagggccgggccgcagccccggccgcttgcagaccccgccatggacccgttcctggtgctgctgcactcggtgtcgtccagcctgtcgagcagcgagctgaccgagctcaagttcctatgcctcgggcgcgtgggcaagcgcaagctggagcgcgtgcagagcggcctagacctcttctccatgctgctggagcagaacgacctggagcccgggcacaccgagctcctgcgcgagctgctcgcctccctgcggcgccacgacctgctgcggcgcgtcgacgacttcgaggcgggggcggcggccggggccgcgcctggggaagaagacctgtgtgcagcatttaacgtcatatgtgataatgtggggaaagattggagaaggctggctcgtcagctcaaagtctcagacaccaagatcgacagcatcgaggacagatacccccgcaacctgacagagcgtgtgcgggagtcactgagaatctggaagaacacagagaaggagaacgcaacagtggcccacctggtgggggctctcangtcctgccagatgaacctggtggctgacctggtacaagaggttcagcaggcccgtgacctccanaacaggagtggggccatgtccccgatgtcatggaactcagacgcatctacctccgaagcgtcctgatgggccgctgctttgcgctggtgnacacaagncatctacacagcctgnaantttggttctctccagnaaggtancccaancactgtgaaaanccaacaggaanccaggctgaatganccacaaacacctgcttntgaactcaactgcntttatnaatgcctctnccgcacaagccgggctttgggccntgcanaaanattttcnatttnttcctccctatgaancttnaacaaaattttntntcccctaaataaactccctgcggnaaaaanttngaaaaattnaaaccntttccaacnaaaaaagaantttttncaaaaaanaatncccncttttnttncncancggaanaaaacactttaaanncccnnaaatngaancaaaanaaaaggtggaaaantggaattttacccccccctntttttncaaaancntttnacccgttgg

SEQ ID NO: 413 - DNA, 1434 bp, Homo Sapiens
  misc_feature (838)..(838): n is a, c, g, or t
  misc_feature (911)..(911): n is a, c, g, or t
  misc_feature (913)..(913): n is a, c, g, or t
  misc_feature (930)..(930): n is a, c, g, or t
  misc_feature (943)..(944): n is a, c, g, or t
  misc_feature (957)..(957): n is a, c, g, or t
  misc_feature (971)..(971): n is a, c, g, or t
  misc_feature (983)..(983): n is a, c, g, or t
  misc_feature (988)..(989): n is a, c, g, or t
  misc_feature (1026)..(1026): n is a, c, g, or t
  misc_feature (1034)..(1034): n is a, c, g, or t
  misc_feature (1043)..(1043): n is a, c, g, or t
  misc_feature (1046)..(1046): n is a, c, g, or t
  misc_feature (1054)..(1054): n is a, c, g, or t
  misc_feature (1060)..(1060): n is a, c, g, or t
  misc_feature (1062)..(1062): n is a, c, g, or t
  misc_feature (1069)..(1069): n is a, c, g, or t
  misc_feature (1087)..(1087): n is a, c, g, or t
  misc_feature (1089)..(1089): n is a, c, g, or t
  misc_feature (1101)..(1101): n is a, c, g, or t
  misc_feature (1104)..(1104): n is a, c, g, or t
  misc_feature (1112)..(1112): n is a, c, g, or t
  misc_feature (1116)..(1116): n is a, c, g, or t
  misc_feature (1121)..(1121): n is a, c, g, or t
  misc_feature (1125)..(1125): n is a, c, g, or t
  misc_feature (1127)..(1127): n is a, c, g, or t
  misc_feature (1129)..(1130): n is a, c, g, or t
  misc_feature (1132)..(1132): n is a, c, g, or t
  misc_feature (1134)..(1134): n is a, c, g, or t
  misc_feature (1142)..(1142): n is a, c, g, or t
  misc_feature (1146)..(1146): n is a, c, g, or t
  misc_feature (1150)..(1150): n is a, c, g, or t
  misc_feature (1160)..(1160): n is a, c, g, or t
  misc_feature (1162)..(1162): n is a, c, g, or t
  misc_feature (1168)..(1170): n is a, c, g, or t
  misc_feature (1182)..(1182): n is a, c, g, or t
  misc_feature (1186)..(1186): n is a, c, g, or t
  misc_feature (1190)..(1192): n is a, c, g, or t
  misc_feature (1194)..(1194): n is a, c, g, or t
  misc_feature (1202)..(1202): n is a, c, g, or t
  misc_feature (1205)..(1207): n is a, c, g, or t
  misc_feature (1215)..(1215): n is a, c, g, or t
  misc_feature (1221)..(1221): n is a, c, g, or t
  misc_feature (1229)..(1229): n is a, c, g, or t
  misc_feature (1231)..(1231): n is a, c, g, or t
  misc_feature (1233)..(1233): n is a, c, g, or t
  misc_feature (1240)..(1240): n is a, c, g, or t
  misc_feature (1249)..(1253): n is a, c, g, or t
  misc_feature (1267)..(1267): n is a, c, g, or t
  misc_feature (1269)..(1269): n is a, c, g, or t
  misc_feature (1275)..(1275): n is a, c, g, or t
  misc_feature (1287)..(1290): n is a, c, g, or t
  misc_feature (1292)..(1292): n is a, c, g, or t
  misc_feature (1294)..(1294): n is a, c, g, or t
  misc_feature (1301)..(1301): n is a, c, g, or t
  misc_feature (1304)..(1304): n is a, c, g, or t
  misc_feature (1316)..(1316): n is a, c, g, or t
  misc_feature (1318)..(1320): n is a, c, g, or t
  misc_feature (1322)..(1322): n is a, c, g, or t
  misc_feature (1329)..(1329): n is a, c, g, or t
  misc_feature (1338)..(1338): n is a, c, g, or t
  misc_feature (1341)..(1341): n is a, c, g, or t
  misc_feature (1344)..(1345): n is a, c, g, or t
  misc_feature (1351)..(1351): n is a, c, g, or t
  misc_feature (1368)..(1368): n is a, c, g, or t
  misc_feature (1381)..(1381): n is a, c, g, or t
  misc_feature (1384)..(1384): n is a, c, g, or t
  misc_feature (1392)..(1392): n is a, c, g, or t
  misc_feature (1395)..(1395): n is a, c, g, or t
  misc_feature (1400)..(1400): n is a, c, g, or t
  misc_feature (1406)..(1406): n is a, c, g, or t
  misc_feature (1408)..(1408): n is a, c, g, or t
  misc_feature (1411)..(1411): n is a, c, g, or t
  misc_feature (1414)..(1414): n is a, c, g, or t
  misc_feature (1421)..(1422): n is a, c, g, or t
  misc_feature (1427)..(1427): n is a, c, g, or t
ccaatagagagaattactatgagaggatcgcatcaccatcaccatcacggatcctatttaggtgacactatagaatcgtcgacccacgcgtccgcccacgcgtccgcttcgcggctgctcaagatgaaccgactcttcgggaaagcgaaacccaaggctccgccgcccagcctgactgactgcattggcacggtggacagtagagcagaatccattgacaagaagatttctcgattggatgctgagctagtgaagtataaggatcagatcaagaagatgagagagggtcctgcaaagaatatggtcaagcagaaagccttgcgagttttaaagcaaaagaggatgtatgagcagcagcgggacaatcttgcccaacagtcattcaacatggaacaagccaattataccatccagtctttgaaggacaccaagaccacggttgatgctatgaaactgggagtaaaggaaatgaagaaggcatacaagcaagtgaagatcgaccagattgaggatttacaagaccagctagaggatatgatggaagatgcaaatgaaatccaagaagcactgagtcgcagttatggcaccccagaactggatgaagatgatttagaagcagagttggatgcactaggtgatgagcttctggctgatgaagacagttcttatttggatgaggcagcatctgcacctgcaattccagaaggtgttcccactgatacaaaaaacaaggatggagttctggtggatgaatttggattgccacagatccctgcttcatagatttgcatcattcaagcatatctttgtaaaacaaacacatatttatggggactangaaatatttatcttttccaaattttgcccttaacagattttaggtttcttttcccttttcttttgaaggaaangntttaatttaccattgcntcttttatttttnnccattaaagaganctcattgcttgggnaaatgcttttcntcccnnctaaaaatttgattcctttttttcttatgaaaaaacnaacctccngttttaaangtnttttttancctccnangacttgnttttccttcattacaaanantttggaaccaanccnaagggaantggnaaacnacananannantntatacctnctcncctnacccatctcntngggggnnncccccccctatngggncccnnntnactttaanccnnnccttgggnccccgnttaaaatncnanaggcccncaaaccccnnnnnttttttcaaacccngntccccnggggtttttttnnnnananccctttnttnggaattttccgntnnngnattccantgggaaaanccnggnntccccnttaattcccaggccccntaaatttgggttntcngttcctgnctnacacncgcctntnttnctntttaatnnaaaanatctttt

SEQ ID NO: 414 - DNA, 1359 bp, Homo Sapiens
  misc_feature (1)..(1): n is a, c, g, or t
  misc_feature (903)..(903): n is a, c, g, or t
  misc_feature (926)..(926): n is a, c, g, or t
  misc_feature (939)..(939): n is a, c, g, or t
  misc_feature (942)..(942): n is a, c, g, or t
  misc_feature (949)..(949): n is a, c, g, or t
  misc_feature (968)..(968): n is a, c, g, or t
  misc_feature (970)..(970): n is a, c, g, or t
  misc_feature (974)..(974): n is a, c, g, or t
  misc_feature (977)..(977): n is a, c, g, or t
  misc_feature (992)..(992): n is a, c, g, or t
  misc_feature (1010)..(1010): n is a, c, g, or t
  misc_feature (1015)..(1015): n is a, c, g, or t
  misc_feature (1020)..(1020): n is a, c, g, or t
  misc_feature (1025)..(1025): n is a, c, g, or t
  misc_feature (1031)..(1031): n is a, c, g, or t
  misc_feature (1039)..(1039): n is a, c, g, or t
  misc_feature (1050)..(1050): n is a, c, g, or t
  misc_feature (1065)..(1065): n is a, c, g, or t
  misc_feature (1070)..(1070): n is a, c, g, or t
  misc_feature (1075)..(1075): n is a, c, g, or t
  misc_feature (1081)..(1081): n is a, c, g, or t
  misc_feature (1092)..(1092): n is a, c, g, or t
  misc_feature (1096)..(1096): n is a, c, g, or t
  misc_feature (1101)..(1102): n is a, c, g, or t
  misc_feature (1105)..(1105): n is a, c, g, or t
  misc_feature (1111)..(1111): n is a, c, g, or t
  misc_feature (1114)..(1114): n is a, c, g, or t
  misc_feature (1117)..(1118): n is a, c, g, or t
  misc_feature (1120)..(1120): n is a, c, g, or t
  misc_feature (1137)..(1137): n is a, c, g, or t
  misc_feature (1140)..(1140): n is a, c, g, or t
  misc_feature (1145)..(1145): n is a, c, g, or t
  misc_feature (1157)..(1157): n is a, c, g, or t
  misc_feature (1162)..(1162): n is a, c, g, or t
  misc_feature (1166)..(1166): n is a, c, g, or t
  misc_feature (1178)..(1178): n is a, c, g, or t
  misc_feature (1183)..(1183): n is a, c, g, or t
  misc_feature (1185)..(1185): n is a, c, g, or t
  misc_feature (1191)..(1191): n is a, c, g, or t
  misc_feature (1196)..(1196): n is a, c, g, or t
  misc_feature (1199)..(1199): n is a, c, g, or t
  misc_feature (1208)..(1209): n is a, c, g, or t
  misc_feature (1216)..(1217): n is a, c, g, or t
  misc_feature (1225)..(1225): n is a, c, g, or t
  misc_feature (1227)..(1227): n is a, c, g, or t
  misc_feature (1235)..(1235): n is a, c, g, or t
  misc_feature (1239)..(1239): n is a, c, g, or t
  misc_feature (1244)..(1246): n is a, c, g, or t
  misc_feature (1249)..(1250): n is a, c, g, or t
  misc_feature (1254)..(1254): n is a, c, g, or t
  misc_feature (1261)..(1263): n is a, c, g, or t
  misc_feature (1268)..(1268): n is a, c, g, or t
  misc_feature (1272)..(1273): n is a, c, g, or t
  misc_feature (1286)..(1286): n is a, c, g, or t
  misc_feature (1292)..(1292): n is a, c, g, or t
  misc_feature (1297)..(1297): n is a, c, g, or t
  misc_feature (1300)..(1301): n is a, c, g, or t
  misc_feature (1303)..(1303): n is a, c, g, or t
  misc_feature (1307)..(1307): n is a, c, g, or t
  misc_feature (1309)..(1310): n is a, c, g, or t
  misc_feature (1313)..(1313): n is a, c, g, or t
  misc_feature (1318)..(1319): n is a, c, g, or t
  misc_feature (1324)..(1324): n is a, c, g, or t
  misc_feature (1329)..(1329): n is a, c, g, or t
  misc_feature (1338)..(1338): n is a, c, g, or t
  misc_feature (1345)..(1345): n is a, c, g, or t
  misc_feature (1356)..(1356): n is a, c, g, or t
naatagagaaattactatgagaggatcgcatcaccatcaccatcacggatcctatttaggtgacactatagaatcgtcgacccacgcgtccgcgatttcctgtagtgaatcaggcaccggagtgcaggttcgggggtggaatccttgggccgctgggcaagcggcgagacctggccagggccagcgagccgaggacagagggcgcacggagggccgggccgcagccccggccgcttgcagaccccgccatggacccgttcctggtgctgctgcactcggtgtcgtccagcctgtcgagcagcgagctgaccgagctcaagttcctatgcctcgggcgcgtgggcaagcgcaagctggagcgcgtgcagagcggcctagacctcttctccatgctgctggagcagaacgacctggagcccgggcacaccgagctcctgcgcgagctgctcgcctccctgcggcgccacgacctgctgcggcgcgtcgacgacttcgaggcgggggcggcggccggggccgcgcctggggaagaagacctgtgtgcagcatttaacgtcatatgtgataatgtggggaaagattggagaaggctggctcgtcagctcaaagtctcagacaccaagatcgacagcatcgaggacagatacccccgcaacctgacagagcgtgtgcgggagtcactgagaatctggaagaacacagagaaggagaacgcaacagtggcccacctggtgggggctctcaggtcctgccagatgaacctggtggctgacctggtacaagaggttcagcaggcccgtgacctccagaacaggagtggggccatgtccccgatgtcatggaactcagacgcatctacctccgaagcgtcctgatgggccgctgctttgcgctggtggaacnacaggcatctacacagcctggantttggttctctcnagnaaggtanccaagcactgtgaaaaccnancagnaanccaggcttgaatganccaaaaaccacctgcttntgaantcaanctgcntttatnaatgcctntcccccacaangccgggcttgggccntgcanaaaantttcantttttcctcantatnaaatnnaanaaaatnttnttnncnctaaataaactccttgnggnaatanttgaaaaatttnaaacntgtnccaccaaaaaanaattntntcaaanaaaanatnccccctttnnttccaanngaaaaaananctttaaancccnaaatnnnaannaaanaaaaagnnnaaaantggnntttaacccccccntttttnaaaancanntnaacntnnggnttttnnccccnaattnaaaaaaaantttttcnttttttggganccc

SEQ ID NO: 415 - DNA, 1273 bp, Homo Sapiens
  misc_feature (881)..(881): n is a, c, g, or t
  misc_feature (883)..(883): n is a, c, g, or t
  misc_feature (891)..(891): n is a, c, g, or t
  misc_feature (913)..(913): n is a, c, g, or t
  misc_feature (965)..(965): n is a, c, g, or t
  misc_feature (969)..(969): n is a, c, g, or t
  misc_feature (993)..(993): n is a, c, g, or t
  misc_feature (1000)..(1000): n is a, c, g, or t
  misc_feature (1009)..(1009): n is a, c, g, or t
  misc_feature (1031)..(1031): n is a, c, g, or t
  misc_feature (1033)..(1033): n is a, c, g, or t
  misc_feature (1035)..(1035): n is a, c, g, or t
  misc_feature (1039)..(1039): n is a, c, g, or t
  misc_feature (1049)..(1049): n is a, c, g, or t
  misc_feature (1059)..(1059): n is a, c, g, or t
  misc_feature (1063)..(1063): n is a, c, g, or t
  misc_feature (1072)..(1072): n is a, c, g, or t
  misc_feature (1081)..(1081): n is a, c, g, or t
  misc_feature (1084)..(1084): n is a, c, g, or t
  misc_feature (1096)..(1096): n is a, c, g, or t
  misc_feature (1100)..(1100): n is a, c, g, or t
  misc_feature (1108)..(1108): n is a, c, g, or t
  misc_feature (1113)..(1113): n is a, c, g, or t
  misc_feature (1117)..(1118): n is a, c, g, or t
  misc_feature (1121)..(1122): n is a, c, g, or t
  misc_feature (1129)..(1130): n is a, c, g, or t
  misc_feature (1135)..(1135): n is a, c, g, or t
  misc_feature (1143)..(1143): n is a, c, g, or t
  misc_feature (1145)..(1145): n is a, c, g, or t
  misc_feature (1153)..(1155): n is a, c, g, or t
  misc_feature (1158)..(1158): n is a, c, g, or t
  misc_feature (1161)..(1161): n is a, c, g, or t
  misc_feature (1164)..(1165): n is a, c, g, or t
  misc_feature (1172)..(1172): n is a, c, g, or t
  misc_feature (1179)..(1179): n is a, c, g, or t
  misc_feature (1182)..(1182): n is a, c, g, or t
  misc_feature (1185)..(1185): n is a, c, g, or t
  misc_feature (1189)..(1189): n is a, c, g, or t
  misc_feature (1193)..(1193): n is a, c, g, or t
  misc_feature (1195)..(1195): n is a, c, g, or t
  misc_feature (1197)..(1197): n is a, c, g, or t
  misc_feature (1199)..(1199): n is a, c, g, or t
  misc_feature (1205)..(1205): n is a, c, g, or t
  misc_feature (1210)..(1210): n is a, c, g, or t
  misc_feature (1217)..(1225): n is a, c, g, or t
  misc_feature (1228)..(1228): n is a, c, g, or t
  misc_feature (1230)..(1230): n is a, c, g, or t
  misc_feature (1237)..(1237): n is a, c, g, or t
  misc_feature (1239)..(1239): n is a, c, g, or t
  misc_feature (1241)..(1243): n is a, c, g, or t
  misc_feature (1250)..(1252): n is a, c, g, or t
  misc_feature (1256)..(1257): n is a, c, g, or t
  misc_feature (1259)..(1260): n is a, c, g, or t
  misc_feature (1266)..(1266): n is a, c, g, or t
  misc_feature (1268)..(1268): n is a, c, g, or t
  misc_feature (1270)..(1270): n is a, c, g, or t
  misc_feature (1273)..(1273): n is a, c, g, or t
tagagaaattactatgagaggatcgcatcaccatcaccatcacggatcctatttaggtgacactatagaatcgtcgacccacgcgtccgggggcccactcagctctgcaccagagattgtgcacgaggacttgaagatggggtctgatggggagagtgaccaggcttcagccacgtcctcggatgaggtgcagtctccagtgagagtgcgtatgcgcaaccatcccccacgcaagatctccactgaggacatcaacaagcgcctatcactaccagctgacatccggctgcctgagggctacctggagaagctgaccctcaatagccccatctttgacaagcccctcagccgccgcctccgtcgtgtcagcctatctgagattggctttgggaaactggagacctacattaagctggacaaactgggcgagggtacctatgccaccgtctacaaaggcaaaagcaagctcacagacaaccttgtggcactcaaggagatcagactggaacatgaagagggggcaccctgcaccgccatccgggaagtgtccctgctcaaggacctcaaacacgccaacatcgttacgctacatgacattatccacacggagaagtccctcacccttgtctttgagtacctggacaaggacctgaagcagtacctggatgactgtgggaacatcatcaacatgcacaacgtgaaagtgggtgtggggcaggaagcaggggcacaagggggcccccactcacccactccaacccacaaatctcccagaaacggacttttccctttggctttttttgctaggagcccttggagggcactgggaccctgtcctcttttgtgtgacaaggctctgggcctagtgtctgtgttttggnangggagcantgcctgctgggggtcgggctantggatagtctttgacctctgcctgccattcctgggtcccagctgttcctgtnccanctgctcgtggcctggcctactgcnccggcanaagggctanccgaaactcagcccaaaactgntntnaacnaaagggaaanctaagctggntganttggtaccntggcctccnttntattggtcccancccnatttccangacantaannccnnttccttnnccttncaaatttncnaaaaaccnnnttnaanggnnttccccnaaattgncanaancccntttnangntntttttnatttnggggggnnnnnnnnnttncnaaaaaantncnnnggggggnnntggnncnncccccnancnttn

SEQ ID NO: 416 - DNA, 1414 bp, Homo Sapiens
  misc_feature (1)..(1): n is a, c, g, or t
  misc_feature (859)..(859): n is a, c, g, or t
  misc_feature (932)..(932): n is a, c, g, or t
  misc_feature (935)..(935): n is a, c, g, or t
  misc_feature (962)..(962): n is a, c, g, or t
  misc_feature (964)..(964): n is a, c, g, or t
  misc_feature (967)..(967): n is a, c, g, or t
  misc_feature (969)..(969): n is a, c, g, or t
  misc_feature (973)..(973): n is a, c, g, or t
  misc_feature (993)..(993): n is a, c, g, or t
  misc_feature (1003)..(1003): n is a, c, g, or t
  misc_feature (1009)..(1009): n is a, c, g, or t
  misc_feature (1012)..(1012): n is a, c, g, or t
  misc_feature (1035)..(1035): n is a, c, g, or t
  misc_feature (1041)..(1041): n is a, c, g, or t
  misc_feature (1045)..(1045): n is a, c, g, or t
  misc_feature (1055)..(1055): n is a, c, g, or t
  misc_feature (1095)..(1095): n is a, c, g, or t
  misc_feature (1105)..(1105): n is a, c, g, or t
  misc_feature (1116)..(1116): n is a, c, g, or t
  misc_feature (1123)..(1123): n is a, c, g, or t
  misc_feature (1128)..(1129): n is a, c, g, or t
  misc_feature (1139)..(1139): n is a, c, g, or t
  misc_feature (1150)..(1150): n is a, c, g, or t
  misc_feature (1152)..(1152): n is a, c, g, or t
  misc_feature (1167)..(1167): n is a, c, g, or t
  misc_feature (1171)..(1172): n is a, c, g, or t
  misc_feature (1174)..(1174): n is a, c, g, or t
  misc_feature (1177)..(1177): n is a, c, g, or t
  misc_feature (1179)..(1179): n is a, c, g, or t
  misc_feature (1191)..(1191): n is a, c, g, or t
  misc_feature (1193)..(1193): n is a, c, g, or t
  misc_feature (1198)..(1198): n is a, c, g, or t
  misc_feature (1207)..(1207): n is a, c, g, or t
  misc_feature (1215)..(1215): n is a, c, g, or t
  misc_feature (1236)..(1236): n is a, c, g, or t
  misc_feature (1243)..(1243): n is a, c, g, or t
  misc_feature (1246)..(1246): n is a, c, g, or t
  misc_feature (1248)..(1249): n is a, c, g, or t
  misc_feature (1254)..(1254): n is a, c, g, or t
  misc_feature (1256)..(1256): n is a, c, g, or t
  misc_feature (1268)..(1268): n is a, c, g, or t
  misc_feature (1276)..(1276): n is a, c, g, or t
  misc_feature (1278)..(1278): n is a, c, g, or t
  misc_feature (1283)..(1283): n is a, c, g, or t
  misc_feature (1285)..(1286): n is a, c, g, or t
  misc_feature (1294)..(1294): n is a, c, g, or t
  misc_feature (1299)..(1299): n is a, c, g, or t
  misc_feature (1301)..(1301): n is a, c, g, or t
  misc_feature (1303)..(1303): n is a, c, g, or t
  misc_feature (1313)..(1313): n is a, c, g, or t
  misc_feature (1325)..(1325): n is a, c, g, or t
  misc_feature (1330)..(1330): n is a, c, g, or t
  misc_feature (1337)..(1337): n is a, c, g, or t
  misc_feature (1352)..(1352): n is a, c, g, or t
  misc_feature (1365)..(1365): n is a, c, g, or t
  misc_feature (1373)..(1374): n is a, c, g, or t
  misc_feature (1376)..(1376): n is a, c, g, or t
  misc_feature (1378)..(1380): n is a, c, g, or t
  misc_feature (1383)..(1383): n is a, c, g, or t
  misc_feature (1390)..(1392): n is a, c, g, or t
  misc_feature (1404)..(1404): n is a, c, g, or t
nttagagaaattactatgagaggatcgcatcaccatcaccatcacggatcctatttaggtgacactatagaatcgtcgacccacgcgtccgccagcccccgcgcccgcccgccagcccgcccagcggtcgggtccgggcgcccgcgcagaatcagctgtctgagctgcccaggcggcgggggagcagcgagcgggcttcagcgagccgcaggaggcacaggcctgtcctgggtccccgcaggtctgcgcgtctgttgttcccagcgctctgagaggcctgaaaaggaagagcaacctgtccagaatccccgcaggaaaggaaaaggaggggaaatctcgacatggaaaaactcttcaatgaaaatgaaggaatgccttcgaatcaaggaaagatagacaatgaagaacagccaccgcacgagggaaagccagaagtagcttgtattctggaagacaagaagttagaaaacgagggaaacacagaaaacacgggcaagagagttgaggaaccgttaaaggataaagaaaagccagagagtgcgggaaaggcaaaaggagaaggaaagtcagagaggaagggaaagtcagagatgcagggaggatcaaagacagagggaaagccagagagagggggaagggcagagggtgaaggagagccagacagtgaaagagagccagagagtgagggagagccagaaagtgaaacaagggctgcaggaaagcgcccagctgaggatgatatacccaggaaagccaaaagaaaaaccaacaaggggctggctcagtacctcaagcaatataaggaagccatacatgatatgaatttcagcaatgaggacatgataagagaatttgacancatggctagggtggaggataaaaaggagaaaaagcaaacagaaattgggggcgtttttgtggatgcaaaaaanttncaggaccccttctatcctaggggttcnanggnanttcngggtggctgcagggcccccncgaagggacnctgaanacnttccttatgtgtagtgtccctgncaggcntttntcaggccatntgttttaaccttatggaaatactttgctttaaccgttccncctgctaccnaaaacgttttnacccccntgccnntgtttgcttnctctttttttncntaacaaatttttccncttnncnttncnaaaacctctttntnttggnaaaaataancccctttnatttcaaaaaaaaaaaagggnggccccnccntnnggggncnaataactttttncctgactngnccctntnnaaaatccnaaggncncnaaccctttgnttttttcaaccncgttncccgggntttttttttggaaanccccttttggganttttggcnngngnnnttnggaaaannnggttcccctttntcccggccta

SEQ ID NO: 417 - DNA, 1370 bp, Homo Sapiens
  misc_feature (958)..(958): n is a, c, g, or t
  misc_feature (994)..(994): n is a, c, g, or t
  misc_feature (1033)..(1033): n is a, c, g, or t
  misc_feature (1057)..(1057): n is a, c, g, or t
  misc_feature (1083)..(1083): n is a, c, g, or t
  misc_feature (1085)..(1085): n is a, c, g, or t
  misc_feature (1092)..(1092): n is a, c, g, or t
  misc_feature (1095)..(1095): n is a, c, g, or t
  misc_feature (1097)..(1097): n is a, c, g, or t
  misc_feature (1100)..(1100): n is a, c, g, or t
  misc_feature (1102)..(1102): n is a, c, g, or t
  misc_feature (1105)..(1105): n is a, c, g, or t
  misc_feature (1120)..(1120): n is a, c, g, or t
  misc_feature (1127)..(1127): n is a, c, g, or t
  misc_feature (1138)..(1138): n is a, c, g, or t
  misc_feature (1140)..(1140): n is a, c, g, or t
  misc_feature (1142)..(1142): n is a, c, g, or t
  misc_feature (1145)..(1145): n is a, c, g, or t
  misc_feature (1152)..(1152): n is a, c, g, or t
  misc_feature (1158)..(1158): n is a, c, g, or t
  misc_feature (1160)..(1160): n is a, c, g, or t
  misc_feature (1167)..(1167): n is a, c, g, or t
  misc_feature (1181)..(1181): n is a, c, g, or t
  misc_feature (1190)..(1190): n is a, c, g, or t
  misc_feature (1203)..(1203): n is a, c, g, or t
  misc_feature (1211)..(1212): n is a, c, g, or t
  misc_feature (1220)..(1220): n is a, c, g, or t
  misc_feature (1238)..(1238): n is a, c, g, or t
  misc_feature (1253)..(1253): n is a, c, g, or t
  misc_feature (1265)..(1265): n is a, c, g, or t
  misc_feature (1275)..(1275): n is a, c, g, or t
  misc_feature (1293)..(1293): n is a, c, g, or t
  misc_feature (1303)..(1303): n is a, c, g, or t
  misc_feature (1310)..(1310): n is a, c, g, or t
  misc_feature (1321)..(1322): n is a, c, g, or t
  misc_feature (1324)..(1324): n is a, c, g, or t
  misc_feature (1327)..(1327): n is a, c, g, or t
  misc_feature (1331)..(1331): n is a, c, g, or t
  misc_feature (1345)..(1345): n is a, c, g, or t
  misc_feature (1353)..(1354): n is a, c, g, or t
  misc_feature (1362)..(1362): n is a, c, g, or t
  misc_feature (1365)..(1365): n is a, c, g, or t
  misc_feature (1370)..(1370): n is a, c, g, or t
tagagagaattactatgagaggatcgcatcaccatcaccatcacggatcctatttaggtgacactatagaatcgtcgacccacgcgtccgcccacgcgtccgatgtaggcaccggtccgagtgcctgccctctgtccccgcggctgggtctcgtctgctccggttcctgggctcctaattcttggtccagcttcttccaggacaggaaaaggaggggaaatctcgacatggaaaaactctacagtgaaaatgaaggaatggcttcaaaccaaggaaagatggaaaatgaagaacagccacaagacgagagaaagccagaagtaacttgtactctggaagacaagaagttagaaaacgagggaaagacagaaaacaagggcaaaacaggagatgaggaaatgttaaaggataaaggaaagccagagagtgagggagaggcaaaagaaggaaagtcagagagggagggagagtcagagatggagggaggatcagagagagagggaaaaccagagatagagggaaagccagagagtgaaggagagccagggagtgaaacaagggctgcaggaaagcgcccagctgaggatgatgtacccaggaaagccaaaagaaaaactaataaggggctggctcattacctcaaggagtataaagaggccatacacgatatgaatttcagcaatgaggacatgataagagaatttgacaatatggctaaggtgcaggatgagaagagaaaaagcaaacagaaattgggggcgtttttgtggatgcaaagaaatttacaggaccccttctaccctagaggtccaagggaattcaggggtggctgcagggccccacgaagggacattgaagacattccttatgtgtagtgtccctggcaggcatttaccaggccatgtgctttaccgttacggtaatactttactttaggcatccctcctgttgctagcanccttttgacctatctgcatgcagtgttctcagtagnaatgttcctctgttacatggaaaaattgttgatggtgcnttgtaaattaaaaacccacttgcnaaccaaaaaaaaaaaaaaaggcgccncnccttagnggncnatnanctnattactgacttgacnctgttanaatccgtatgncncnacnccttggnttttcnancctcgtnccccggcttttttngggaatccncttctgggatttncggctagnncttatggnaaaatccgggttcccctntttcccggcccaaanttttggtttttntttttttctnacccctctgttttctttnacaaaaaaanatttccntttttttcccnngnccntttngaaagggggggggncccctttnnaaattttnaanaaccn

SEQ ID NO: 418 - DNA, 1385 bp, Homo Sapiens; identical to SEQ ID NO: 157
  misc_feature (873)..(873): n is a, c, g, or t
  misc_feature (920)..(920): n is a, c, g, or t
  misc_feature (931)..(972): n is a, c, g, or t
  misc_feature (980)..(980): n is a, c, g, or t
  misc_feature (984)..(984): n is a, c, g, or t
  misc_feature (993)..(993): n is a, c, g, or t
  misc_feature (998)..(999): n is a, c, g, or t
  misc_feature (1001)..(1002): n is a, c, g, or t
  misc_feature (1024)..(1024): n is a, c, g, or t
  misc_feature (1031)..(1031): n is a, c, g, or t
  misc_feature (1047)..(1049): n is a, c, g, or t
  misc_feature (1052)..(1052): n is a, c, g, or t
  misc_feature (1057)..(1057): n is a, c, g, or t
  misc_feature (1071)..(1071): n is a, c, g, or t
  misc_feature (1076)..(1076): n is a, c, g, or t
  misc_feature (1082)..(1083): n is a, c, g, or t
  misc_feature (1088)..(1088): n is a, c, g, or t
  misc_feature (1094)..(1094): n is a, c, g, or t
  misc_feature (1115)..(1115): n is a, c, g, or t
  misc_feature (1117)..(1117): n is a, c, g, or t
  misc_feature (1120)..(1120): n is a, c, g, or t
  misc_feature (1131)..(1131): n is a, c, g, or t
  misc_feature (1151)..(1152): n is a, c, g, or t
  misc_feature (1192)..(1192): n is a, c, g, or t
  misc_feature (1199)..(1199): n is a, c, g, or t
  misc_feature (1205)..(1207): n is a, c, g, or t
  misc_feature (1212)..(1212): n is a, c, g, or t
  misc_feature (1215)..(1215): n is a, c, g, or t
  misc_feature (1234)..(1234): n is a, c, g, or t
  misc_feature (1240)..(1241): n is a, c, g, or t
  misc_feature (1243)..(1243): n is a, c, g, or t
  misc_feature (1247)..(1247): n is a, c, g, or t
  misc_feature (1254)..(1254): n is a, c, g, or t
  misc_feature (1257)..(1257): n is a, c, g, or t
  misc_feature (1267)..(1268): n is a, c, g, or t
  misc_feature (1270)..(1270): n is a, c, g, or t
  misc_feature (1283)..(1283): n is a, c, g, or t
  misc_feature (1289)..(1289): n is a, c, g, or t
  misc_feature (1293)..(1293): n is a, c, g, or t
  misc_feature (1296)..(1296): n is a, c, g, or t
  misc_feature (1305)..(1305): n is a, c, g, or t
  misc_feature (1309)..(1309): n is a, c, g, or t
  misc_feature (1325)..(1326): n is a, c, g, or t
  misc_feature (1328)..(1328): n is a, c, g, or t
  misc_feature (1330)..(1331): n is a, c, g, or t
  misc_feature (1339)..(1339): n is a, c, g, or t
  misc_feature (1344)..(1344): n is a, c, g, or t
  misc_feature (1350)..(1350): n is a, c, g, or t
  misc_feature (1357)..(1358): n is a, c, g, or t
  misc_feature (1368)..(1368): n is a, c, g, or t
  misc_feature (1370)..(1370): n is a, c, g, or t
  misc_feature (1372)..(1373): n is a, c, g, or t
  misc_feature (1376)..(1376): n is a, c, g, or t
  misc_feature (1381)..(1381): n is a, c, g, or t

SEQ ID NO: 419 - DNA, 1379 bp, Homo Sapiens
  misc_feature (912)..(912): n is a, c, g, or t
  misc_feature (961)..(961): n is a, c, g, or t
  misc_feature (966)..(967): n is a, c, g, or t
  misc_feature (972)..(973): n is a, c, g, or t
  misc_feature (990)..(990): n is a, c, g, or t
  misc_feature (1003)..(1003): n is a, c, g, or t
  misc_feature (1008)..(1008): n is a, c, g, or t
  misc_feature (1013)..(1013): n is a, c, g, or t
  misc_feature (1019)..(1019): n is a, c, g, or t
  misc_feature (1022)..(1022): n is a, c, g, or t
  misc_feature (1035)..(1035): n is a, c, g, or t
  misc_feature (1037)..(1037): n is a, c, g, or t
  misc_feature (1040)..(1040): n is a, c, g, or t
  misc_feature (1048)..(1048): n is a, c, g, or t
  misc_feature (1053)..(1053): n is a, c, g, or t
  misc_feature (1070)..(1070): n is a, c, g, or t
  misc_feature (1072)..(1072): n is a, c, g, or t
  misc_feature (1078)..(1078): n is a, c, g, or t
  misc_feature (1090)..(1090): n is a, c, g, or t
  misc_feature (1096)..(1096): n is a, c, g, or t
  misc_feature (1102)..(1102): n is a, c, g, or t
  misc_feature (1106)..(1106): n is a, c, g, or t
  misc_feature (1112)..(1112): n is a, c, g, or t
  misc_feature (1129)..(1129): n is a, c, g, or t
  misc_feature (1132)..(1132): n is a, c, g, or t
  misc_feature (1134)..(1134): n is a, c, g, or t
  misc_feature (1138)..(1138): n is a, c, g, or t
  misc_feature (1142)..(1143): n is a, c, g, or t
  misc_feature (1157)..(1157): n is a, c, g, or t
  misc_feature (1159)..(1159): n is a, c, g, or t
  misc_feature (1164)..(1164): n is a, c, g, or t
  misc_feature (1175)..(1175): n is a, c, g, or t
  misc_feature (1177)..(1178): n is a, c, g, or t
  misc_feature (1183)..(1183): n is a, c, g, or t
  misc_feature (1186)..(1186): n is a, c, g, or t
  misc_feature (1197)..(1197): n is a, c, g, or t
  misc_feature (1204)..(1204): n is a, c, g, or t
  misc_feature (1209)..(1209): n is a, c, g, or t
  misc_feature (1218)..(1218): n is a, c, g, or t
  misc_feature (1267)..(1267): n is a, c, g, or t
  misc_feature (1273)..(1273): n is a, c, g, or t
  misc_feature (1275)..(1276): n is a, c, g, or t
  misc_feature (1278)..(1278): n is a, c, g, or t
  misc_feature (1281)..(1281): n is a, c, g, or t
  misc_feature (1291)..(1291): n is a, c, g, or t
  misc_feature (1298)..(1300): n is a, c, g, or t
  misc_feature (1310)..(1310): n is a, c, g, or t
  misc_feature (1314)..(1314): n is a, c, g, or t
  misc_feature (1318)..(1318): n is a, c, g, or t
  misc_feature (1334)..(1334): n is a, c, g, or t
  misc_feature (1343)..(1343): n is a, c, g, or t
  misc_feature (1345)..(1345): n is a, c, g, or t
  misc_feature (1365)..(1366): n is a, c, g, or t
  misc_feature (1371)..(1371): n is a, c, g, or t
  misc_feature (1376)..(1376): n is a, c, g, or t
  misc_feature (1378)..(1378): n is a, c, g, or t
tagagaaattactatgagaggatcgcatcaccatcaccatcacggatcctatttaggtgacactatagaatcgtcgacccacgcgtccggtttaaagatggcggcggaggaacctcagcagcagaagcaggagccgctgggcagcgactccgaaggtgttaactgtctggcctatgatgaagccatcatggctcagcaggaccgaattcagcaagagattgctgtgcagaaccctctggtgtcagagcggctggagctctcggtcctatacaaggagtatgctgaagatgacaacatctatcaacagaagatcaaggacctccacaaaaagtactcgtacatccgcaagaccaggcctgacggcaactgtttctatcgggctttcggattctcccacttggaggcactgctggatgacagcaaggagttgcagcggtgagaagggtgggcactgggcaccgaggcaggtgggtgtctacctcctccccgggcgagtaggatgtgtctcgagtagggtgtctccctccttcccgggcgatgggctggactctggccttgccaggcggggcagtgctgtctcggccctggcgtctgggctggtcgaggagcccatgctgggcccgcctttccatcccacccccaggttcaaggctgtgtctgccaagagcaaggaagacctggtgtcccagggcttcactgaattcacaattgaggatttccacaacacgttcatggacctgattgagcaggtggagaagcagacctctgtcgccgacctgctggcctccttcaatgaccagagcacctccgactaccttgtggtctacctgcggctgctcacctcgggctacctgcagcgcgagagcaagttcttcgagcacttcatcgagggtggacggactgtcaaggaanttctgcccaacaggaaggtggaacccatgtgcaaggaaaagcgaaccanatccnncatcnnttgcgctgggcccaggncccttcaaccgtntccantccanggtggnaanaaaattggacccncnggngaaggggnggcanccaccaatcccgcaaantntttccntgaaggcttccnaacccnaagggnctanctttcnttaccgggcctgggaanctnanaaanttcnnctaaaaataggggntnggttncaaccccttgntnnccctnggngcccccctttngcaaggnccttnaaatttaanaaaaggttttttttggggtttaaaaagggcccaaatttccccccttttntcctgntnnanaancccccccccntgttttnnnaaaagggggnccgngggnaacccggggggggttnccttttttngncccccggggttttttttttnnccccnccccnang

SEQ ID NO: 420 - DNA, 1261 bp, Homo Sapiens
  misc_feature (775)..(775): n is a, c, g, or t
  misc_feature (827)..(827): n is a, c, g, or t
  misc_feature (847)..(847): n is a, c, g, or t
  misc_feature (865)..(865): n is a, c, g, or t
  misc_feature (871)..(872): n is a, c, g, or t
  misc_feature (882)..(882): n is a, c, g, or t
  misc_feature (917)..(917): n is a, c, g, or t
  misc_feature (920)..(920): n is a, c, g, or t
  misc_feature (923)..(923): n is a, c, g, or t
  misc_feature (959)..(959): n is a, c, g, or t
  misc_feature (974)..(974): n is a, c, g, or t
  misc_feature (986)..(986): n is a, c, g, or t
  misc_feature (990)..(990): n is a, c, g, or t
  misc_feature (993)..(993): n is a, c, g, or t
  misc_feature (997)..(998): n is a, c, g, or t
  misc_feature (1002)..(1002): n is a, c, g, or t
  misc_feature (1013)..(1013): n is a, c, g, or t
  misc_feature (1019)..(1019): n is a, c, g, or t
  misc_feature (1026)..(1026): n is a, c, g, or t
  misc_feature (1030)..(1030): n is a, c, g, or t
  misc_feature (1037)..(1037): n is a, c, g, or t
  misc_feature (1039)..(1039): n is a, c, g, or t
  misc_feature (1052)..(1052): n is a, c, g, or t
  misc_feature (1055)..(1057): n is a, c, g, or t
  misc_feature (1065)..(1065): n is a, c, g, or t
  misc_feature (1068)..(1071): n is a, c, g, or t
  misc_feature (1073)..(1073): n is a, c, g, or t
  misc_feature (1080)..(1085): n is a, c, g, or t
  misc_feature (1090)..(1091): n is a, c, g, or t
  misc_feature (1095)..(1095): n is a, c, g, or t
  misc_feature (1101)..(1101): n is a, c, g, or t
  misc_feature (1106)..(1106): n is a, c, g, or t
  misc_feature (1108)..(1109): n is a, c, g, or t
  misc_feature (1113)..(1113): n is a, c, g, or t
  misc_feature (1118)..(1118): n is a, c, g, or t
  misc_feature (1122)..(1123): n is a, c, g, or t
  misc_feature (1131)..(1131): n is a, c, g, or t
  misc_feature (1133)..(1140): n is a, c, g, or t
  misc_feature (1144)..(1145): n is a, c, g, or t
  misc_feature (1147)..(1147): n is a, c, g, or t
  misc_feature (1149)..(1151): n is a, c, g, or t
  misc_feature (1153)..(1155): n is a, c, g, or t
  misc_feature (1157)..(1160): n is a, c, g, or t
  misc_feature (1166)..(1166): n is a, c, g, or t
  misc_feature (1184)..(1184): n is a, c, g, or t
  misc_feature (1186)..(1186): n is a, c, g, or t
  misc_feature (1192)..(1196): n is a, c, g, or t
  misc_feature (1205)..(1206): n is a, c, g, or t
  misc_feature (1210)..(1211): n is a, c, g, or t
  misc_feature (1219)..(1220): n is a, c, g, or t
  misc_feature (1235)..(1237): n is a, c, g, or t
  misc_feature (1240)..(1245): n is a, c, g, or t
  misc_feature (1254)..(1254): n is a, c, g, or t
  misc_feature (1261)..(1261): n is a, c, g, or t
agaaattactatgagaggatcgcatcaccatcaccatcacggatcctatttaggtgacactatagaatcgtcgacccacgcgtccgccccaaaggaattccgagaaatctcttacctcaagaaattgaaggttaaaaagcaggaccgtatattccccccagaaaccagcgcctccgtggcggccacgcctccgccctccacagcctcggctcctgctgctgtgaactcctctgcttcagcagataagccattatccaacatgaagatcctgactctcgggaagctgtcccggaacaaggatgaagtgaaggccatgattgagaaactcggggggaagttgacggggacggccaacaaggcttccctgtgcatcagcaccaaaaaggaggtggaaaagatgaataagaagatggaggaagtaaaggaagccaacatccgagttgtgtctgaggacttcctccaggacgtctccgcctccaccaagagccttcaggagttgttcttagcgcacatcttgtccccttggggggcagaggtgaaggcagagcctgttgaagttgtggccccaagagggaagtcaggggctgcgctctccaaaaaagcaagggccaggtcaaggaggaaggtatcaacaaatctgaaaagagaatgaaattaactcttaaaggaggagcagctgtggatcctgattctggactggaacactctgcgcatgtcctggaaaaaggtgggaaggtcttcagtgccacccttggcctggtggacatcgttaaanggaaccaactcctactacaagctgcagcttctggaggacgacaaggaaaacnggtattggatattcaggtcntggggccgtgtgggtacngggatnnggtaaccaanaaactggaaaaaatgccgtccaagggaggatgccnttnganccctttcttggaaatttttttgaaaaaaaaaaaccngggaaacccttgggncctcccaaaaantttnccngaanntttncccaaaaaaanttttcnccccccngggnaaatttnanattttgggccccnaannnaaaaaaangcnnnngnaaaaaannnnnnaaaannaaantttttnggggncnnaaantttcnaaannttcccccnannnnnnnntttnngngnnncnnntnnnnaaaaanattttttttttttttggngnaaaaannnnnaaaaaaaanncccnngggggggnnaaaaaaaaaaaaaannnccnnnnnnaaaaaaaanccctttn

SEQ ID NO: 421 - DNA, 1320 bp, Homo Sapiens; identical to SEQ ID NO: 102
  misc_feature (882)..(882): n is a, c, g, or t
  misc_feature (920)..(920): n is a, c, g, or t
  misc_feature (943)..(943): n is a, c, g, or t
  misc_feature (959)..(959): n is a, c, g, or t
  misc_feature (965)..(965): n is a, c, g, or t
  misc_feature (972)..(972): n is a, c, g, or t
  misc_feature (986)..(986): n is a, c, g, or t
  misc_feature (1020)..(1020): n is a, c, g, or t
  misc_feature (1023)..(1023): n is a, c, g, or t
  misc_feature (1033)..(1033): n is a, c, g, or t
  misc_feature (1039)..(1039): n is a, c, g, or t
  misc_feature (1043)..(1043): n is a, c, g, or t
  misc_feature (1046)..(1046): n is a, c, g, or t
  misc_feature (1056)..(1056): n is a, c, g, or t
  misc_feature (1060)..(1061): n is a, c, g, or t
  misc_feature (1070)..(1070): n is a, c, g, or t
  misc_feature (1073)..(1073): n is a, c, g, or t
  misc_feature (1085)..(1085): n is a, c, g, or t
  misc_feature (1091)..(1091): n is a, c, g, or t
  misc_feature (1094)..(1094): n is a, c, g, or t
  misc_feature (1097)..(1097): n is a, c, g, or t
  misc_feature (1108)..(1108): n is a, c, g, or t
  misc_feature (1112)..(1112): n is a, c, g, or t
  misc_feature (1115)..(1115): n is a, c, g, or t
  misc_feature (1117)..(1117): n is a, c, g, or t
  misc_feature (1123)..(1123): n is a, c, g, or t
  misc_feature (1129)..(1129): n is a, c, g, or t
  misc_feature (1134)..(1134): n is a, c, g, or t
  misc_feature (1144)..(1144): n is a, c, g, or t
  misc_feature (1151)..(1151): n is a, c, g, or t
  misc_feature (1155)..(1155): n is a, c, g, or t
  misc_feature (1158)..(1158): n is a, c, g, or t
  misc_feature (1166)..(1167): n is a, c, g, or t
  misc_feature (1171)..(1171): n is a, c, g, or t
  misc_feature (1174)..(1174): n is a, c, g, or t
  misc_feature (1177)..(1177): n is a, c, g, or t
  misc_feature (1179)..(1179): n is a, c, g, or t
  misc_feature (1181)..(1181): n is a, c, g, or t
  misc_feature (1183)..(1183): n is a, c, g, or t
  misc_feature (1202)..(1202): n is a, c, g, or t
  misc_feature (1210)..(1210): n is a, c, g, or t
  misc_feature (1214)..(1214): n is a, c, g, or t
  misc_feature (1227)..(1227): n is a, c, g, or t
  misc_feature (1229)..(1231): n is a, c, g, or t
  misc_feature (1233)..(1234): n is a, c, g, or t
  misc_feature (1240)..(1243): n is a, c, g, or t
  misc_feature (1257)..(1257): n is a, c, g, or t
  misc_feature (1265)..(1266): n is a, c, g, or t
  misc_feature (1268)..(1270): n is a, c, g, or t
  misc_feature (1274)..(1274): n is a, c, g, or t
  misc_feature (1279)..(1281): n is a, c, g, or t
  misc_feature (1283)..(1283): n is a, c, g, or t
  misc_feature (1293)..(1296): n is a, c, g, or t
  misc_feature (1305)..(1308): n is a, c, g, or t
  misc_feature (1311)..(1313): n is a, c, g, or t
  misc_feature (1319)..(1320): n is a, c, g, or t

SEQ ID NO: 422 - DNA, 1381 bp, Homo Sapiens
  misc_feature (917)..(917): n is a, c, g, or t
  misc_feature (952)..(952): n is a, c, g, or t
  misc_feature (985)..(985): n is a, c, g, or t
  misc_feature (1001)..(1001): n is a, c, g, or t
  misc_feature (1040)..(1040): n is a, c, g, or t
  misc_feature (1044)..(1044): n is a, c, g, or t
  misc_feature (1049)..(1050): n is a, c, g, or t
  misc_feature (1085)..(1085): n is a, c, g, or t
  misc_feature (1091)..(1091): n is a, c, g, or t
  misc_feature (1095)..(1095): n is a, c, g, or t
  misc_feature (1098)..(1098): n is a, c, g, or t
  misc_feature (1105)..(1105): n is a, c, g, or t
  misc_feature (1111)..(1112): n is a, c, g, or t
  misc_feature (1114)..(1114): n is a, c, g, or t
  misc_feature (1124)..(1126): n is a, c, g, or t
  misc_feature (1128)..(1128): n is a, c, g, or t
  misc_feature (1142)..(1142): n is a, c, g, or t
  misc_feature (1146)..(1146): n is a, c, g, or t
  misc_feature (1148)..(1148): n is a, c, g, or t
  misc_feature (1174)..(1174): n is a, c, g, or t
  misc_feature (1186)..(1186): n is a, c, g, or t
  misc_feature (1189)..(1189): n is a, c, g, or t
  misc_feature (1198)..(1198): n is a, c, g, or t
  misc_feature (1223)..(1223): n is a, c, g, or t
  misc_feature (1228)..(1228): n is a, c, g, or t
  misc_feature (1233)..(1234): n is a, c, g, or t
  misc_feature (1238)..(1239): n is a, c, g, or t
  misc_feature (1241)..(1241): n is a, c, g, or t
  misc_feature (1244)..(1244): n is a, c, g, or t
  misc_feature (1246)..(1247): n is a, c, g, or t
  misc_feature (1254)..(1254): n is a, c, g, or t
  misc_feature (1259)..(1259): n is a, c, g, or t
  misc_feature (1261)..(1262): n is a, c, g, or t
  misc_feature (1265)..(1265): n is a, c, g, or t
  misc_feature (1267)..(1268): n is a, c, g, or t
  misc_feature (1271)..(1272): n is a, c, g, or t
  misc_feature (1276)..(1276): n is a, c, g, or t
  misc_feature (1288)..(1288): n is a, c, g, or t
  misc_feature (1291)..(1293): n is a, c, g, or t
  misc_feature (1297)..(1297): n is a, c, g, or t
  misc_feature (1303)..(1303): n is a, c, g, or t
  misc_feature (1321)..(1321): n is a, c, g, or t
  misc_feature (1328)..(1328): n is a, c, g, or t
  misc_feature (1330)..(1330): n is a, c, g, or t
  misc_feature (1332)..(1332): n is a, c, g, or t
  misc_feature (1350)..(1352): n is a, c, g, or t
  misc_feature (1356)..(1356): n is a, c, g, or t
  misc_feature (1364)..(1364): n is a, c, g, or t
  misc_feature (1367)..(1367): n is a, c, g, or t
  misc_feature (1369)..(1370): n is a, c, g, or t
tagagaaattactatgagaggatcgcatcaccatcaccatcacggatcctatttaggtgacactatagaatcgtcgacccacgcgtccggctaccagctccccgctgccctgagctcggcgggctggcattcggcccggggaaaagcggagcaggtctgcgaggctaagtgtctccgcggcgcacctcgcggcgagaatccggaggagaaggagactgcaaggataggcccaggtcggtgcgagggacggtggtggggcgggggtcggaacgtaaggaaagcccagtctgagaccccaaccccctccaccccatcccccactcctataccggtcctccattttggtgcctgcaaagctctgggaaagaatcccgggaaacgaaaaatggtgggtttgggggaagggaggtaaggggagaaagctggagggaggggctttaattggaggccccgtagaggacgcgcggaacttctaaggtgggaaaaaacgaaattaaaaaatcctttgatatcagggctctgaatcctgctggtcagagcaccaagcattcagtctctctccttgcctttgtcttacttgtgttcaaagaaaaacaaccagaaaaaaaaaatctcatcatggcaaatattcaccaggaaaacgaagagatggagcagcctatgcagaatggagaggaagaccgccctttgggaggaggtgaaggccaccagcctgcaggaaatcgacggggacaggctcgccgacttgcccctaattttcgatgggccatacccaataggcagatcaatgatgggatgggtggagatggagatgatatggaaatattcatggaggagatgagagaaatcagaagaaaacttagggagctgcagttgaggaattgtctgcgtatccttatgggggagctctctaatcnccatgaccatcatgatgaattttgccttatgcctngactcctgccatttatcatgaaattaatactgngattcccgctgttttnctttttccttgcattttcctaaaatgcctttactgatcngttngctgnnaaccctatgttatttccatgtgtcaagtgggtctngttttnccanctnctatttnaaaatnncntttgccctcnnngnaaatttctgttcancaanantttccccctttttctggaaaaatttnaagcttaaaaanccnttttaaaanccaaaaaaaaaaaaaaaaaaaaaanggggngcccnncccnnanggngnncaataancttantnnctnanntgnncccnttttaaaacccnaannncccnaacccnctggttttttaaaccccntttcccngngnttttttttggaaaccccnnntttngaattttnaanannaaaaaaaaaaa

SEQ ID NO: 423 - DNA, 1306 bp, Homo Sapiens
  misc_feature (828)..(828): n is a, c, g, or t
  misc_feature (866)..(866): n is a, c, g, or t
  misc_feature (903)..(903): n is a, c, g, or t
  misc_feature (930)..(930): n is a, c, g, or t
  misc_feature (942)..(942): n is a, c, g, or t
  misc_feature (964)..(964): n is a, c, g, or t
  misc_feature (972)..(972): n is a, c, g, or t
  misc_feature (981)..(981): n is a, c, g, or t
  misc_feature (985)..(985): n is a, c, g, or t
  misc_feature (1020)..(1020): n is a, c, g, or t
  misc_feature (1023)..(1023): n is a, c, g, or t
  misc_feature (1029)..(1029): n is a, c, g, or t
  misc_feature (1035)..(1035): n is a, c, g, or t
  misc_feature (1038)..(1038): n is a, c, g, or t
  misc_feature (1044)..(1044): n is a, c, g, or t
  misc_feature (1049)..(1049): n is a, c, g, or t
  misc_feature (1052)..(1052): n is a, c, g, or t
  misc_feature (1060)..(1060): n is a, c, g, or t
  misc_feature (1065)..(1065): n is a, c, g, or t
  misc_feature (1068)..(1068): n is a, c, g, or t
  misc_feature (1071)..(1071): n is a, c, g, or t
  misc_feature (1087)..(1087): n is a, c, g, or t
  misc_feature (1101)..(1101): n is a, c, g, or t
  misc_feature (1106)..(1106): n is a, c, g, or t
  misc_feature (1109)..(1109): n is a, c, g, or t
  misc_feature (1116)..(1116): n is a, c, g, or t
  misc_feature (1122)..(1122): n is a, c, g, or t
  misc_feature (1125)..(1125): n is a, c, g, or t
  misc_feature (1132)..(1136): n is a, c, g, or t
  misc_feature (1152)..(1152): n is a, c, g, or t
  misc_feature (1160)..(1160): n is a, c, g, or t
  misc_feature (1175)..(1176): n is a, c, g, or t
  misc_feature (1180)..(1180): n is a, c, g, or t
  misc_feature (1182)..(1182): n is a, c, g, or t
  misc_feature (1189)..(1189): n is a, c, g, or t
  misc_feature (1199)..(1199): n is a, c, g, or t
  misc_feature (1202)..(1202): n is a, c, g, or t
  misc_feature (1207)..(1207): n is a, c, g, or t
  misc_feature (1210)..(1210): n is a, c, g, or t
  misc_feature (1216)..(1217): n is a, c, g, or t
  misc_feature (1236)..(1236): n is a, c, g, or t
  misc_feature (1243)..(1243): n is a, c, g, or t
  misc_feature (1249)..(1249): n is a, c, g, or t
  misc_feature (1251)..(1251): n is a, c, g, or t
  misc_feature (1269)..(1269): n is a, c, g, or t
  misc_feature (1283)..(1284): n is a, c, g, or t
  misc_feature (1287)..(1287): n is a, c, g, or t
  misc_feature (1291)..(1291): n is a, c, g, or t
  misc_feature (1294)..(1294): n is a, c, g, or t
  misc_feature (1303)..(1303): n is a, c, g, or t
tagagaaattactatgagaggatcgcatcaccatcaccatcacggatcctatttaggtgacactatagaatcgtcgacccacgcgtccgcggacgcgtggggtggtggagaaggacgtgccgtgccgctgggttctgagccggagtggtcggtgggtgggatggaggcgaccttggagcagcacttggaagacacaatgaagaatccctccattgttggagtcctgtgcacagattcacaaggacttaatctgggttgccgcgggaccctgtcagatgagcatgctggagtgatatctgttctagcccagcaagcagctaagctaacctctgaccccactgatattcctgtggtgtgtctagaatcagataatgggaacattatgatccagaaacacgatggcatcacggtggcagtgcacaaaatggcctcttgatgctcatatctgttcttcagcagcctgtcataggaactggatcctacctatgttaattaccttatagaactactaaagttccagtagttaggccattcatttaatgtgcattaggcacttttctgtttatttaagagtcaattgctttctaatgctctatggaccgactatcaagatattagtaagaaaggatcatgttttgaagcagcaggtccaggtcactttgtatatagaattttgctgtattcaataaatctgtttggaggaaaaaaaaaaaaaaaaaaaagggcggccgctccctatagtgagtcgtattaagcttaattagctgagcttggactcctgttgatagatccagtaatgacctcagaactccatctggatttgttcanaacgctcggttgccgccgggcgtttttttattggtganaatccaagctagcttggcgagattttcaggagctaangaaacctaaaatggaaaaaaaaaatcnctggatataccnccgttgatatatcccaatggcnatcgtaanaacattttngagncatttcagtcagttgctcatgtacctaataaccanacngttcanctgganatnacggcnttttnaanaccgtaanaaaanaanccnaagttttatccggccnttattccaattctngcccnccngaagaangccccnccngaaattnnnnnggcaataaaaaagggnacctgggnaaagggaaaatgttnncccntnttacccnttttcccagnaanaaagnaancttttnntccccctggaagaaaaccnaaaaaanttccgngnttttcaaaaaaatttccnaaaagggggggttnnggnaaanccncccattccnaag

SEQ ID NO: 424 - DNA, 1361 bp, Homo Sapiens
  misc_feature (868)..(868): n is a, c, g, or t
  misc_feature (876)..(876): n is a, c, g, or t
  misc_feature (896)..(896): n is a, c, g, or t
  misc_feature (898)..(898): n is a, c, g, or t
  misc_feature (946)..(946): n is a, c, g, or t
  misc_feature (949)..(949): n is a, c, g, or t
  misc_feature (967)..(967): n is a, c, g, or t
  misc_feature (970)..(970): n is a, c, g, or t
  misc_feature (986)..(986): n is a, c, g, or t
  misc_feature (1016)..(1016): n is a, c, g, or t
  misc_feature (1018)..(1018): n is a, c, g, or t
  misc_feature (1022)..(1022): n is a, c, g, or t
  misc_feature (1024)..(1024): n is a, c, g, or t
  misc_feature (1032)..(1032): n is a, c, g, or t
  misc_feature (1034)..(1034): n is a, c, g, or t
  misc_feature (1038)..(1038): n is a, c, g, or t
  misc_feature (1058)..(1058): n is a, c, g, or t
  misc_feature (1062)..(1062): n is a, c, g, or t
  misc_feature (1064)..(1064): n is a, c, g, or t
  misc_feature (1066)..(1066): n is a, c, g, or t
  misc_feature (1080)..(1081): n is a, c, g, or t
  misc_feature (1083)..(1084): n is a, c, g, or t
  misc_feature (1096)..(1096): n is a, c, g, or t
  misc_feature (1102)..(1102): n is a, c, g, or t
  misc_feature (1104)..(1105): n is a, c, g, or t
  misc_feature (1122)..(1122): n is a, c, g, or t
  misc_feature (1127)..(1130): n is a, c, g, or t
  misc_feature (1137)..(1137): n is a, c, g, or t
  misc_feature (1143)..(1143): n is a, c, g, or t
  misc_feature (1145)..(1146): n is a, c, g, or t
  misc_feature (1150)..(1150): n is a, c, g, or t
  misc_feature (1152)..(1152): n is a, c, g, or t
  misc_feature (1159)..(1159): n is a, c, g, or t
  misc_feature (1164)..(1164): n is a, c, g, or t
  misc_feature (1169)..(1169): n is a, c, g, or t
  misc_feature (1174)..(1174): n is a, c, g, or t
  misc_feature (1176)..(1176): n is a, c, g, or t
  misc_feature (1179)..(1179): n is a, c, g, or t
  misc_feature (1182)..(1182): n is a, c, g, or t
  misc_feature (1186)..(1186): n is a, c, g, or t
  misc_feature (1188)..(1188): n is a, c, g, or t
  misc_feature (1192)..(1192): n is a, c, g, or t
  misc_feature (1195)..(1195): n is a, c, g, or t
  misc_feature (1202)..(1202): n is a, c, g, or t
  misc_feature (1204)..(1204): n is a, c, g, or t
  misc_feature (1214)..(1214): n is a, c, g, or t
  misc_feature (1222)..(1224): n is a, c, g, or t
  misc_feature (1229)..(1234): n is a, c, g, or t
  misc_feature (1237)..(1240): n is a, c, g, or t
  misc_feature (1242)..(1242): n is a, c, g, or t
  misc_feature (1244)..(1248): n is a, c, g, or t
  misc_feature (1250)..(1252): n is a, c, g, or t
  misc_feature (1255)..(1277): n is a, c, g, or t
  misc_feature (1280)..(1281): n is a, c, g, or t
  misc_feature (1287)..(1287): n is a, c, g, or t
  misc_feature (1289)..(1298): n is a, c, g, or t
  misc_feature (1300)..(1330): n is a, c, g, or t
  misc_feature (1333)..(1338): n is a, c, g, or t
  misc_feature (1340)..(1340): n is a, c, g, or t
  misc_feature (1342)..(1350): n is a, c, g, or t
  misc_feature (1353)..(1361): n is a, c, g, or t
tagagaaattactatgagaggatcgcatcaccatcaccatcacggatcctatttaggtgacactatagaatcgtcgacccacgcgtccgggccgcccatcgtccctgtgaagacgcccacggtgcctgactcccccggctacatggggcccacacgggcgggcagtgaggagtgcgtcttctataccgacgagaccgcctcacccctggcaccggacctcgccaaggcctccccaaagaggctcagcctgcccaacacagcctggggcagcccatccccagaggcagccgggtaccccggggcaggggccgaggacgagcagcagcagctggcggccaaccggcacagcctggtggagaagctgggggagctggtggcgggtgcccacgcactgggtgagggccagttccccttccccactgctctgtcggccacccccacggaggagacgcccaccccacccccagccgccaccagcgaccccccggccgaagacatgctggtggccatccggcgtggggtccggctccgcaggaccgtcaccaacgacaggtcggcgccccgcatcttatgatggcgccaccctccccatcctctcaggccccagtgcgagcaggtggcctggtctgtgagccgcaggcactcagagcaaaggcccagccaggagagaggacagagccagggcagaggccatgccactttatggaaagacacctcacttggattccagcatttaaacaggaagtgacttcttagcaagcctggccaggacggagcctgcaggcctgggcctggttcggggtctgttttatgctcttcggtccctcctcttcctcctctggggccctgcttcttccctacccataancaccaaanccagggccgctgcccatgananaagggccaggctggcttccttttaacattcccggccttctccaagggntgntcttgcctcaactcttcntgnaatgctggcccccttntcccttgcctgaaccccctcttcccttttngncttntntttgcctntnccanggcccttttcttcaaaaagngggncngnttttgaaaggccanntnnaacctttggttngatttntnnttgggggttgggggccnagggnnnnaagtttnaatttngnngccnanccccccntttgnaaagnatttncnggnccncccnantttnaanaaaaaananggtttttttngggggggnnnttttnnnnnnttnnnntntnnnnntnnnttnnnnnnnnnnnnnnnnnnnnnnnaanntttttnannnnnnnnnntnnnnnnnnnnnnnnnnnnnnnnnnnnnnnnnttnnnnnntntnnnnnnnnnttnnnnnnnnn

SEQ ID NO: 425 - DNA, 1324 bp, Homo Sapiens
  misc_feature (895)..(895): n is a, c, g, or t
  misc_feature (936)..(936): n is a, c, g, or t
  misc_feature (938)..(938): n is a, c, g, or t
  misc_feature (951)..(951): n is a, c, g, or t
  misc_feature (964)..(964): n is a, c, g, or t
  misc_feature (975)..(975): n is a, c, g, or t
  misc_feature (985)..(985): n is a, c, g, or t
  misc_feature (988)..(988): n is a, c, g, or t
  misc_feature (992)..(992): n is a, c, g, or t
  misc_feature (995)..(996): n is a, c, g, or t
  misc_feature (1000)..(1001): n is a, c, g, or t
  misc_feature (1009)..(1009): n is a, c, g, or t
  misc_feature (1033)..(1033): n is a, c, g, or t
  misc_feature (1073)..(1073): n is a, c, g, or t
  misc_feature (1076)..(1078): n is a, c, g, or t
  misc_feature (1081)..(1082): n is a, c, g, or t
  misc_feature (1087)..(1087): n is a, c, g, or t
  misc_feature (1089)..(1090): n is a, c, g, or t
  misc_feature (1092)..(1162): n is a, c, g, or t
  misc_feature (1168)..(1169): n is a, c, g, or t
  misc_feature (1171)..(1171): n is a, c, g, or t
  misc_feature (1186)..(1186): n is a, c, g, or t
  misc_feature (1193)..(1195): n is a, c, g, or t
  misc_feature (1198)..(1199): n is a, c, g, or t
  misc_feature (1201)..(1202): n is a, c, g, or t
  misc_feature (1206)..(1207): n is a, c, g, or t
  misc_feature (1211)..(1211): n is a, c, g, or t
  misc_feature (1219)..(1219): n is a, c, g, or t
  misc_feature (1233)..(1234): n is a, c, g, or t
  misc_feature (1237)..(1238): n is a, c, g, or t
  misc_feature (1243)..(1246): n is a, c, g, or t
  misc_feature (1255)..(1255): n is a, c, g, or t
  misc_feature (1260)..(1260): n is a, c, g, or t
  misc_feature (1267)..(1267): n is a, c, g, or t
  misc_feature (1270)..(1270): n is a, c, g, or t
  misc_feature (1285)..(1287): n is a, c, g, or t
  misc_feature (1295)..(1295): n is a, c, g, or t
  misc_feature (1297)..(1297): n is a, c, g, or t
  misc_feature (1301)..(1302): n is a, c, g, or t
  misc_feature (1311)..(1312): n is a, c, g, or t
  misc_feature (1317)..(1318): n is a, c, g, or t
tagagaaattactatgagaggatcgcatcaccatcaccatcacggatcctatttaggtgacactatagaatcgtcgacccacgcgtccgggggagcggcatgtcaccatcactggctctccggtctccatcgccctggcccagtacctcatcactgcctgtctagagacggccaagtctacctctggggggacgcccagctcggcccccgcagacctgcctgcccccttctcgccacccctgacggccctgcccacagctccccctggcctgctgggcacaccctatgccatctccctctccaacttcatcggcctcaagcccatgcccttcttggctttaccacctgcttccccagggccgccgccgggcttggcggcctacactgccaagatggcagcagctaatgggagcaagaaggctgagcggcagaaattctccccctactgaggccagctgaggtacaggcaggggcaggcaggaccaccagcagggggctgcctctgcaccctacccgcccaaggagactccaccctggggtcccaaacgccgctaacgcccagacgcatggatgcaccccctaccctgcctccatctatgggagttctttctctcagagtgggggcagtttctggcccaggggtctgagctgcggcagccccagggcagggggccctacctcctcagctctgtgcttggatacagggagcagccaggagactccctagtgcccccaccatggcgggtgtcactcacgcactccccatcccttagggcttcctggcctactgcatccttgtgggagtcagggaggaaggcccgttgggtagctggggccaggcttctctccccaccacctgcaaatttcttgctgcttccactgatacccttttgantggaatgaactggctggggcttgtcagggggcaccccaaananggggcactgccangtaactgggggantggcatggggnaggggccaanttntcancannaaannttttgtanagtttttttcaatccctgtttttnaaaaaatattctcaaaaacttattgatttggaaaaaaaanaannnaannaaaanannannnnnnnnnnnnnnnnnnnnnnnnnnnnnnnnnnnnnnnnnnnnnnnnnnnnnnnnnnnnnnnnnnnnnnngggggnncncccccaaaagggggnaaaaaannnaannannaaanntggncccctgtnaaaaaaaaaaaaannccnnaaacnnnnggttttttnaaaanccttttnccngggggtttttttttnnnaaaaaaananattnngaaattttnnaaaannaaaaaa

SEQ ID NO: 426 - DNA, 1388 bp, Homo Sapiens; identical to SEQ ID NO: 179
  misc_feature (725)..(725): n is a, c, g, or t
  misc_feature (888)..(888): n is a, c, g, or t
  misc_feature (895)..(895): n is a, c, g, or t
  misc_feature (906)..(906): n is a, c, g, or t
  misc_feature (915)..(915): n is a, c, g, or t
  misc_feature (935)..(935): n is a, c, g, or t
  misc_feature (958)..(958): n is a, c, g, or t
  misc_feature (962)..(962): n is a, c, g, or t
  misc_feature (964)..(964): n is a, c, g, or t
  misc_feature (972)..(972): n is a, c, g, or t
  misc_feature (995)..(996): n is a, c, g, or t
  misc_feature (999)..(999): n is a, c, g, or t
  misc_feature (1003)..(1003): n is a, c, g, or t
  misc_feature (1005)..(1005): n is a, c, g, or t
  misc_feature (1026)..(1026): n is a, c, g, or t
  misc_feature (1030)..(1030): n is a, c, g, or t
  misc_feature (1036)..(1036): n is a, c, g, or t
  misc_feature (1046)..(1046): n is a, c, g, or t
  misc_feature (1052)..(1052): n is a, c, g, or t
  misc_feature (1054)..(1054): n is a, c, g, or t
  misc_feature (1062)..(1062): n is a, c, g, or t
  misc_feature (1073)..(1073): n is a, c, g, or t
  misc_feature (1075)..(1076): n is a, c, g, or t
  misc_feature (1078)..(1078): n is a, c, g, or t
  misc_feature (1081)..(1081): n is a, c, g, or t
  misc_feature (1087)..(1087): n is a, c, g, or t
  misc_feature (1090)..(1090): n is a, c, g, or t
  misc_feature (1093)..(1094): n is a, c, g, or t
  misc_feature (1097)..(1097): n is a, c, g, or t
  misc_feature (1099)..(1099): n is a, c, g, or t
  misc_feature (1104)..(1104): n is a, c, g, or t
  misc_feature (1106)..(1106): n is a, c, g, or t
  misc_feature (1109)..(1109): n is a, c, g, or t
  misc_feature (1118)..(1118): n is a, c, g, or t
  misc_feature (1124)..(1124): n is a, c, g, or t
  misc_feature (1126)..(1127): n is a, c, g, or t
  misc_feature (1130)..(1130): n is a, c, g, or t
  misc_feature (1149)..(1149): n is a, c, g, or t
  misc_feature (1154)..(1154): n is a, c, g, or t
  misc_feature (1156)..(1156): n is a, c, g, or t
  misc_feature (1161)..(1162): n is a, c, g, or t
  misc_feature (1167)..(1169): n is a, c, g, or t
  misc_feature (1173)..(1175): n is a, c, g, or t
  misc_feature (1177)..(1178): n is a, c, g, or t
  misc_feature (1183)..(1183): n is a, c, g, or t
  misc_feature (1190)..(1191): n is a, c, g, or t
  misc_feature (1203)..(1203): n is a, c, g, or t
  misc_feature (1215)..(1215): n is a, c, g, or t
  misc_feature (1224)..(1225): n is a, c, g, or t
  misc_feature (1233)..(1233): n is a, c, g, or t
  misc_feature (1235)..(1236): n is a, c, g, or t
  misc_feature (1239)..(1240): n is a, c, g, or t
  misc_feature (1245)..(1246): n is a, c, g, or t
  misc_feature (1249)..(1249): n is a, c, g, or t
  misc_feature (1259)..(1260): n is a, c, g, or t
  misc_feature (1262)..(1264): n is a, c, g, or t
  misc_feature (1266)..(1266): n is a, c, g, or t
  misc_feature (1269)..(1269): n is a, c, g, or t
  misc_feature (1271)..(1271): n is a, c, g, or t
  misc_feature (1283)..(1283): n is a, c, g, or t
  misc_feature (1287)..(1287): n is a, c, g, or t
  misc_feature (1292)..(1292): n is a, c, g, or t
  misc_feature (1294)..(1295): n is a, c, g, or t
  misc_feature (1299)..(1299): n is a, c, g, or t
  misc_feature (1303)..(1303): n is a, c, g, or t
  misc_feature (1305)..(1305): n is a, c, g, or t
  misc_feature (1310)..(1310): n is a, c, g, or t
  misc_feature (1316)..(1316): n is a, c, g, or t
  misc_feature (1320)..(1321): n is a, c, g, or t
  misc_feature (1328)..(1328): n is a, c, g, or t
  misc_feature (1332)..(1333): n is a, c, g, or t
  misc_feature (1344)..(1344): n is a, c, g, or t
  misc_feature (1348)..(1350): n is a, c, g, or t
  misc_feature (1354)..(1354): n is a, c, g, or t
  misc_feature (1356)..(1356): n is a, c, g, or t
  misc_feature (1362)..(1362): n is a, c, g, or t
  misc_feature (1371)..(1372): n is a, c, g, or t
  misc_feature (1374)..(1374): n is a, c, g, or t
  misc_feature (1380)..(1380): n is a, c, g, or t
  misc_feature (1385)..(1385): n is a, c, g, or t
  misc_feature (1387)..(1388): n is a, c, g, or t

SEQ ID NO: 427 - DNA, 1424 bp, Homo Sapiens
  misc_feature (757)..(757): n is a, c, g, or t
  misc_feature (855)..(855): n is a, c, g, or t
  misc_feature (875)..(875): n is a, c, g, or t
  misc_feature (899)..(899): n is a, c, g, or t
  misc_feature (943)..(943): n is a, c, g, or t
  misc_feature (955)..(955): n is a, c, g, or t
  misc_feature (980)..(980): n is a, c, g, or t
  misc_feature (988)..(988): n is a, c, g, or t
  misc_feature (1004)..(1004): n is a, c, g, or t
  misc_feature (1012)..(1012): n is a, c, g, or t
  misc_feature (1030)..(1030): n is a, c, g, or t
  misc_feature (1054)..(1054): n is a, c, g, or t
  misc_feature (1058)..(1058): n is a, c, g, or t
  misc_feature (1064)..(1064): n is a, c, g, or t
  misc_feature (1066)..(1066): n is a, c, g, or t
  misc_feature (1074)..(1074): n is a, c, g, or t
  misc_feature (1083)..(1083): n is a, c, g, or t
  misc_feature (1101)..(1101): n is a, c, g, or t
  misc_feature (1111)..(1111): n is a, c, g, or t
  misc_feature (1113)..(1113): n is a, c, g, or t
  misc_feature (1128)..(1128): n is a, c, g, or t
  misc_feature (1137)..(1137): n is a, c, g, or t
  misc_feature (1141)..(1142): n is a, c, g, or t
  misc_feature (1150)..(1150): n is a, c, g, or t
  misc_feature (1153)..(1153): n is a, c, g, or t
  misc_feature (1159)..(1159): n is a, c, g, or t
  misc_feature (1166)..(1166): n is a, c, g, or t
  misc_feature (1174)..(1174): n is a, c, g, or t
  misc_feature (1187)..(1187): n is a, c, g, or t
  misc_feature (1190)..(1190): n is a, c, g, or t
  misc_feature (1196)..(1196): n is a, c, g, or t
  misc_feature (1201)..(1201): n is a, c, g, or t
  misc_feature (1205)..(1205): n is a, c, g, or t
  misc_feature (1216)..(1216): n is a, c, g, or t
  misc_feature (1219)..(1222): n is a, c, g, or t
  misc_feature (1225)..(1225): n is a, c, g, or t
  misc_feature (1228)..(1228): n is a, c, g, or t
  misc_feature (1233)..(1234): n is a, c, g, or t
  misc_feature (1239)..(1240): n is a, c, g, or t
  misc_feature (1242)..(1242): n is a, c, g, or t
  misc_feature (1252)..(1252): n is a, c, g, or t
  misc_feature (1264)..(1264): n is a, c, g, or t
  misc_feature (1267)..(1267): n is a, c, g, or t
  misc_feature (1278)..(1278): n is a, c, g, or t
  misc_feature (1286)..(1286): n is a, c, g, or t
  misc_feature (1288)..(1288): n is a, c, g, or t
  misc_feature (1295)..(1298): n is a, c, g, or t
  misc_feature (1312)..(1312): n is a, c, g, or t
  misc_feature (1316)..(1316): n is a, c, g, or t
  misc_feature (1318)..(1318): n is a, c, g, or t
  misc_feature (1325)..(1325): n is a, c, g, or t
  misc_feature (1333)..(1333): n is a, c, g, or t
  misc_feature (1343)..(1343): n is a, c, g, or t
  misc_feature (1360)..(1361): n is a, c, g, or t
  misc_feature (1373)..(1374): n is a, c, g, or t
  misc_feature (1382)..(1382): n is a, c, g, or t
  misc_feature (1385)..(1385): n is a, c, g, or t
  misc_feature (1390)..(1391): n is a, c, g, or t
  misc_feature (1394)..(1394): n is a, c, g, or t
  misc_feature (1396)..(1396): n is a, c, g, or t
  misc_feature (1398)..(1398): n is a, c, g, or t
  misc_feature (1400)..(1400): n is a, c, g, or t
  misc_feature (1405)..(1406): n is a, c, g, or t
tagagaaattactatgagaggatcgcatcaccatcaccatcacggatcctatttaggtgacactatagaatcgtcgacccacgcgtccggaagaatttcctctgaagcaccggaacttgctactaccagcaccatgccctaccaatatccagcactgaccccggagcagaagaaggagctgtctgacatcgctcaccgcatcgtggcacctggcaagggcatcctggctgcagatgagtccactgggagcattgccaagcggctgcagtccattggcaccgagaacaccgaggagaaccggcgcttctaccgccagctgctgctgacagctgacgaccgcgtgaacccctgcattgggggtgtcatcctcttccatgagacactctaccagaaggcggatgatgggcgtcccttcccccaagttatcaaatccaagggcggtgttgtgggcatcaaggtagacaagggcgtggtccccctggcagggacaaatggcgagactaccacccaagggttggatgggctgtctgagcgctgtgcccagtacaagaaggacggacctgacttcgccaagtggcgttgtgtgctgaagattggggaacacaccccctcagccctcgccatcatggaaaatgccaatgttctggcccgttatgccagtatctgccagcagaatggcattgtgcccatcgtggagcctgagatcctccctgatggggaccatgacttgaagcgctgccagtatgtgaccgagaangtgctggctgctgtctacaaggctctgagtgaccaccacatctacctggaaggcaccttgctgaagcccaacatggtcacccccaggccatgcttgcnctcaaaagttttctcatgangaaaattgccatggcgaccgtcanagcgcttgcgccgcacagtgccccccgctgtccactggggatcncctttcctgttntgggaggccaaaaatgaagaagaangcgtccantcaacctcaatgccanttaaaaantggcccccctgcttaaancccttgggccctgaacctttttcntaanggccgnanccctgganggccttttnccctgaaggcctgggggngggaaaaaangnaaaacctgaaggttncccaagaanaaanntttaaagnaanccctgnccaaaancctttctntttaagaaaaaanctnccaaangttangttngggttttttcnaannnntcnttnttttnnttaanncnccttattaanggagggtttccnggntcccccaaaantcagggcntnccccctnnnnttttaaaaaaaagncccncnctggggnccaagggnttgccccccntttttttcccctaaaanngggggggccccnnaaaaaaanccnccttnncgncntncnaaaanntttttggaaaaaaaaaaa

SEQ ID NO: 428 - DNA, 1406 bp, Homo Sapiens
  misc_feature (680)..(680): n is a, c, g, or t
  misc_feature (701)..(701): n is a, c, g, or t
  misc_feature (732)..(732): n is a, c, g, or t
  misc_feature (742)..(742): n is a, c, g, or t
  misc_feature (779)..(779): n is a, c, g, or t
  misc_feature (817)..(817): n is a, c, g, or t
  misc_feature (838)..(839): n is a, c, g, or t
  misc_feature (856)..(856): n is a, c, g, or t
  misc_feature (865)..(865): n is a, c, g, or t
  misc_feature (867)..(867): n is a, c, g, or t
  misc_feature (879)..(880): n is a, c, g, or t
  misc_feature (895)..(895): n is a, c, g, or t
  misc_feature (920)..(920): n is a, c, g, or t
  misc_feature (925)..(925): n is a, c, g, or t
  misc_feature (935)..(935): n is a, c, g, or t
  misc_feature (941)..(941): n is a, c, g, or t
  misc_feature (947)..(948): n is a, c, g, or t
  misc_feature (952)..(952): n is a, c, g, or t
  misc_feature (959)..(959): n is a, c, g, or t
  misc_feature (970)..(970): n is a, c, g, or t
  misc_feature (973)..(973): n is a, c, g, or t
  misc_feature (985)..(985): n is a, c, g, or t
  misc_feature (989)..(989): n is a, c, g, or t
  misc_feature (992)..(992): n is a, c, g, or t
  misc_feature (1003)..(1003): n is a, c, g, or t
  misc_feature (1010)..(1010): n is a, c, g, or t
  misc_feature (1014)..(1014): n is a, c, g, or t
  misc_feature (1042)..(1042): n is a, c, g, or t
  misc_feature (1044)..(1044): n is a, c, g, or t
  misc_feature (1051)..(1051): n is a, c, g, or t
  misc_feature (1074)..(1074): n is a, c, g, or t
  misc_feature (1081)..(1081): n is a, c, g, or t
  misc_feature (1083)..(1083): n is a, c, g, or t
  misc_feature (1086)..(1086): n is a, c, g, or t
  misc_feature (1093)..(1093): n is a, c, g, or t
  misc_feature (1097)..(1097): n is a, c, g, or t
  misc_feature (1099)..(1099): n is a, c, g, or t
  misc_feature (1101)..(1101): n is a, c, g, or t
  misc_feature (1132)..(1132): n is a, c, g, or t
  misc_feature (1134)..(1134): n is a, c, g, or t
  misc_feature (1138)..(1138): n is a, c, g, or t
  misc_feature (1150)..(1150): n is a, c, g, or t
  misc_feature (1156)..(1156): n is a, c, g, or t
  misc_feature (1160)..(1162): n is a, c, g, or t
  misc_feature (1164)..(1165): n is a, c, g, or t
  misc_feature (1167)..(1168): n is a, c, g, or t
  misc_feature (1170)..(1170): n is a, c, g, or t
  misc_feature (1172)..(1174): n is a, c, g, or t
  misc_feature (1179)..(1179): n is a, c, g, or t
  misc_feature (1191)..(1191): n is a, c, g, or t
  misc_feature (1203)..(1203): n is a, c, g, or t
  misc_feature (1208)..(1208): n is a, c, g, or t
  misc_feature (1216)..(1216): n is a, c, g, or t
  misc_feature (1219)..(1219): n is a, c, g, or t
  misc_feature (1222)..(1222): n is a, c, g, or t
  misc_feature (1236)..(1237): n is a, c, g, or t
  misc_feature (1246)..(1246): n is a, c, g, or t
  misc_feature (1251)..(1251): n is a, c, g, or t
  misc_feature (1255)..(1255): n is a, c, g, or t
  misc_feature (1271)..(1272): n is a, c, g, or t
  misc_feature (1287)..(1289): n is a, c, g, or t
  misc_feature (1291)..(1291): n is a, c, g, or t
  misc_feature (1298)..(1298): n is a, c, g, or t
  misc_feature (1319)..(1319): n is a, c, g, or t
  misc_feature (1329)..(1329): n is a, c, g, or t
  misc_feature (1332)..(1332): n is a, c, g, or t
  misc_feature (1335)..(1335): n is a, c, g, or t
  misc_feature (1342)..(1346): n is a, c, g, or t
  misc_feature (1348)..(1348): n is a, c, g, or t
  misc_feature (1350)..(1350): n is a, c, g, or t
  misc_feature (1352)..(1352): n is a, c, g, or t
  misc_feature (1355)..(1356): n is a, c, g, or t
  misc_feature (1369)..(1369): n is a, c, g, or t
  misc_feature (1374)..(1374): n is a, c, g, or t
  misc_feature (1381)..(1382): n is a, c, g, or t
  misc_feature (1388)..(1388): n is a, c, g, or t
  misc_feature (1390)..(1393): n is a, c, g, or t
  misc_feature (1396)..(1396): n is a, c, g, or t
  misc_feature (1403)..(1403): n is a, c, g, or t
tagagaaattactatgagaggatcgcatcaccatcaccatcacggatcctatttaggtgacactatagaatcgtcgacccacgcgtccgctgtgcccgcggtgtgccgcaaggagccttgcgtcctgggcgtcgatgaggcgggcaggggccccgtgctgggccccatggtctacgccatctgttattgtcccctgcctcgcctggcagatctggaggcgctgaaagtggcagactcaaagaccctattggagagcgagcgggaaaggctgtttgcgaaaatggaggacacggactttgtcggctgggcgctggatgtgctgtctccaaacctcatctctaccagcatgcttgggcgggtcaaatacaacctgaactccctgtcacatgatacagccactgggcttatacagtatgcattggaccagggcgtgaacgtcacccaggtattcgtggacaccgtagggatgccagagacataccaggcgcggctgcagcaaagttttcccgggattgaggtgacggtcaaggccaaagcagatgccctctacccggtggttagtgctgccagcatctgtgccaaggtggcccgggaccaggccgtgaagaaatggcagttcgtggagaaactgcaggacttggatactgattatggctcaggctaccccaatgatcccaaanacaaaagcgtggttgaaggancacgtggagcctgtgttcggcttccccccantttgtccggntcagctggcgcacggcccaaaccatcctggaaaaaanaagcggaaaatgtttatatgggaagactccaccatccnaaaaatcaaggaaggaactcnngaaaaatcacatcctanttcctcaangnaagggtcccaanncccgttccccgtttntttccaacgaaaattttcctggaangcggncctggaaatnaaaaanaaaccnnttanaaaattnccttttaaccnctntaactgggtttncccnaanccaaaaatttnaaaattntttnaaggaaaaaccccccctaaggggatttncntttttgnaaaaaaaaaaaaagggggaaatntggtttntnaanccgggtncaantnantttctttttgaaaacttaaaaaaaagggggntngggntaattatttttnaaaaanaaannnanntnnanannnggggnggcccccccccnaaaaggggggcnaattnaacttaantanacnaacttgggaccccnngttaaaaanccccnaaanacccccaaaccccctnngttttttttaaaaannngntgtcccngggggtttttttttggaaaanaaccactttnggnatnttttggnnnnngnancnaanngaaaaaaaaaccnggaanccccctnntttccngnnnnctnaaaaaanttg

SEQ ID NO: 429 - DNA, 1330 bp, Homo Sapiens; identical to SEQ ID NO: 11
  misc_feature (4)..(4): n is a, c, g, or t
  misc_feature (748)..(748): n is a, c, g, or t
  misc_feature (795)..(795): n is a, c, g, or t
  misc_feature (805)..(805): n is a, c, g, or t
  misc_feature (837)..(837): n is a, c, g, or t
  misc_feature (865)..(865): n is a, c, g, or t
  misc_feature (869)..(869): n is a, c, g, or t
  misc_feature (873)..(873): n is a, c, g, or t
  misc_feature (876)..(876): n is a, c, g, or t
  misc_feature (878)..(878): n is a, c, g, or t
  misc_feature (881)..(881): n is a, c, g, or t
  misc_feature (890)..(893): n is a, c, g, or t
  misc_feature (897)..(897): n is a, c, g, or t
  misc_feature (900)..(900): n is a, c, g, or t
  misc_feature (909)..(909): n is a, c, g, or t
  misc_feature (911)..(911): n is a, c, g, or t
  misc_feature (920)..(920): n is a, c, g, or t
  misc_feature (926)..(926): n is a, c, g, or t
  misc_feature (931)..(932): n is a, c, g, or t
  misc_feature (935)..(935): n is a, c, g, or t
  misc_feature (940)..(940): n is a, c, g, or t
  misc_feature (942)..(946): n is a, c, g, or t
  misc_feature (949)..(949): n is a, c, g, or t
  misc_feature (952)..(953): n is a, c, g, or t
  misc_feature (956)..(956): n is a, c, g, or t
  misc_feature (959)..(959): n is a, c, g, or t
  misc_feature (965)..(967): n is a, c, g, or t
  misc_feature (971)..(971): n is a, c, g, or t
  misc_feature (974)..(974): n is a, c, g, or t
  misc_feature (976)..(979): n is a, c, g, or t
  misc_feature (981)..(981): n is a, c, g, or t
  misc_feature (989)..(989): n is a, c, g, or t
  misc_feature (994)..(995): n is a, c, g, or t
  misc_feature (997)..(1001): n is a, c, g, or t
  misc_feature (1003)..(1006): n is a, c, g, or t
  misc_feature (1010)..(1100): n is a, c, g, or t
  misc_feature (1102)..(1102): n is a, c, g, or t
  misc_feature (1104)..(1107): n is a, c, g, or t
  misc_feature (1109)..(1109): n is a, c, g, or t
  misc_feature (1113)..(1121): n is a, c, g, or t
  misc_feature (1123)..(1131): n is a, c, g, or t
  misc_feature (1133)..(1135): n is a, c, g, or t
  misc_feature (1137)..(1154): n is a, c, g, or t
  misc_feature (1156)..(1159): n is a, c, g, or t
  misc_feature (1161)..(1166): n is a, c, g, or t
  misc_feature (1172)..(1174): n is a, c, g, or t
  misc_feature (1176)..(1195): n is a, c, g, or t
  misc_feature (1204)..(1208): n is a, c, g, or t
  misc_feature (1210)..(1219): n is a, c, g, or t
  misc_feature (1222)..(1227): n is a, c, g, or t
  misc_feature (1232)..(1253): n is a, c, g, or t
  misc_feature (1256)..(1272): n is a, c, g, or t
  misc_feature (1276)..(1289): n is a, c, g, or t
  misc_feature (1292)..(1295): n is a, c, g, or t
  misc_feature (1299)..(1304): n is a, c, g, or t
  misc_feature (1306)..(1330): n is a, c, g, or t

SEQ ID NO: 430 - DNA, 1393 bp, Homo Sapiens; identical to SEQ ID NO: 168
  misc_feature (826)..(826): n is a, c, g, or t
  misc_feature (903)..(903): n is a, c, g, or t
  misc_feature (908)..(908): n is a, c, g, or t
  misc_feature (919)..(919): n is a, c, g, or t
  misc_feature (928)..(928): n is a, c, g, or t
  misc_feature (946)..(946): n is a, c, g, or t
  misc_feature (989)..(989): n is a, c, g, or t
  misc_feature (1031)..(1031): n is a, c, g, or t
  misc_feature (1040)..(1040): n is a, c, g, or t
  misc_feature (1063)..(1063): n is a, c, g, or t
  misc_feature (1066)..(1066): n is a, c, g, or t
  misc_feature (1075)..(1075): n is a, c, g, or t
  misc_feature (1078)..(1078): n is a, c, g, or t
  misc_feature (1081)..(1081): n is a, c, g, or t
  misc_feature (1086)..(1086): n is a, c, g, or t
  misc_feature (1102)..(1103): n is a, c, g, or t
  misc_feature (1122)..(1122): n is a, c, g, or t
  misc_feature (1124)..(1124): n is a, c, g, or t
  misc_feature (1127)..(1128): n is a, c, g, or t
  misc_feature (1140)..(1140): n is a, c, g, or t
  misc_feature (1147)..(1147): n is a, c, g, or t
  misc_feature (1150)..(1150): n is a, c, g, or t
  misc_feature (1156)..(1156): n is a, c, g, or t
  misc_feature (1158)..(1158): n is a, c, g, or t
  misc_feature (1165)..(1165): n is a, c, g, or t
  misc_feature (1179)..(1179): n is a, c, g, or t
  misc_feature (1182)..(1182): n is a, c, g, or t
  misc_feature (1186)..(1186): n is a, c, g, or t
  misc_feature (1194)..(1194): n is a, c, g, or t
  misc_feature (1203)..(1203): n is a, c, g, or t
  misc_feature (1216)..(1216): n is a, c, g, or t
  misc_feature (1218)..(1218): n is a, c, g, or t
  misc_feature (1221)..(1222): n is a, c, g, or t
  misc_feature (1245)..(1246): n is a, c, g, or t
  misc_feature (1248)..(1251): n is a, c, g, or t
  misc_feature (1254)..(1256): n is a, c, g, or t
  misc_feature (1258)..(1258): n is a, c, g, or t
  misc_feature (1261)..(1261): n is a, c, g, or t
  misc_feature (1263)..(1265): n is a, c, g, or t
  misc_feature (1269)..(1269): n is a, c, g, or t
  misc_feature (1273)..(1275): n is a, c, g, or t
  misc_feature (1279)..(1280): n is a, c, g, or t
  misc_feature (1292)..(1294): n is a, c, g, or t
  misc_feature (1298)..(1304): n is a, c, g, or t
  misc_feature (1308)..(1312): n is a, c, g, or t
  misc_feature (1316)..(1316): n is a, c, g, or t
  misc_feature (1325)..(1328): n is a, c, g, or t
  misc_feature (1336)..(1337): n is a, c, g, or t
  misc_feature (1341)..(1344): n is a, c, g, or t
  misc_feature (1347)..(1348): n is a, c, g, or t
  misc_feature (1354)..(1358): n is a, c, g, or t
  misc_feature (1362)..(1364): n is a, c, g, or t
  misc_feature (1367)..(1369): n is a, c, g, or t
  misc_feature (1371)..(1372): n is a, c, g, or t
  misc_feature (1375)..(1375): n is a, c, g, or t
  misc_feature (1381)..(1383): n is a, c, g, or t
  misc_feature (1386)..(1388): n is a, c, g, or t
  misc_feature (1391)..(1391): n is a, c, g, or t
  misc_feature (1393)..(1393): n is a, c, g, or t

SEQ ID NO: 431 - DNA, 1370 bp, Homo Sapiens
  misc_feature (908)..(908): n is a, c, g, or t
  misc_feature (932)..(932): n is a, c, g, or t
  misc_feature (938)..(938): n is a, c, g, or t
  misc_feature (947)..(947): n is a, c, g, or t
  misc_feature (959)..(959): n is a, c, g, or t
  misc_feature (967)..(967): n is a, c, g, or t
  misc_feature (969)..(969): n is a, c, g, or t
  misc_feature (971)..(971): n is a, c, g, or t
  misc_feature (975)..(975): n is a, c, g, or t
  misc_feature (983)..(983): n is a, c, g, or t
  misc_feature (988)..(988): n is a, c, g, or t
  misc_feature (990)..(990): n is a, c, g, or t
  misc_feature (1001)..(1001): n is a, c, g, or t
  misc_feature (1007)..(1007): n is a, c, g, or t
  misc_feature (1009)..(1009): n is a, c, g, or t
  misc_feature (1012)..(1012): n is a, c, g, or t
  misc_feature (1019)..(1019): n is a, c, g, or t
  misc_feature (1023)..(1023): n is a, c, g, or t
  misc_feature (1034)..(1034): n is a, c, g, or t
  misc_feature (1047)..(1047): n is a, c, g, or t
  misc_feature (1050)..(1050): n is a, c, g, or t
  misc_feature (1055)..(1055): n is a, c, g, or t
  misc_feature (1058)..(1058): n is a, c, g, or t
  misc_feature (1062)..(1062): n is a, c, g, or t
  misc_feature (1078)..(1079): n is a, c, g, or t
  misc_feature (1087)..(1087): n is a, c, g, or t
  misc_feature (1089)..(1089): n is a, c, g, or t
  misc_feature (1093)..(1093): n is a, c, g, or t
  misc_feature (1101)..(1101): n is a, c, g, or t
  misc_feature (1104)..(1104): n is a, c, g, or t
  misc_feature (1121)..(1121): n is a, c, g, or t
  misc_feature (1125)..(1125): n is a, c, g, or t
  misc_feature (1136)..(1136): n is a, c, g, or t
  misc_feature (1143)..(1143): n is a, c, g, or t
  misc_feature (1148)..(1148): n is a, c, g, or t
  misc_feature (1154)..(1154): n is a, c, g, or t
  misc_feature (1159)..(1159): n is a, c, g, or t
  misc_feature (1161)..(1161): n is a, c, g, or t
  misc_feature (1164)..(1165): n is a, c, g, or t
  misc_feature (1167)..(1167): n is a, c, g, or t
  misc_feature (1170)..(1170): n is a, c, g, or t
  misc_feature (1174)..(1174): n is a, c, g, or t
  misc_feature (1177)..(1177): n is a, c, g, or t
  misc_feature (1180)..(1180): n is a, c, g, or t
  misc_feature (1184)..(1184): n is a, c, g, or t
  misc_feature (1190)..(1194): n is a, c, g, or t
  misc_feature (1204)..(1204): n is a, c, g, or t
  misc_feature (1208)..(1208): n is a, c, g, or t
  misc_feature (1212)..(1212): n is a, c, g, or t
  misc_feature (1214)..(1216): n is a, c, g, or t
  misc_feature (1220)..(1221): n is a, c, g, or t
  misc_feature (1227)..(1228): n is a, c, g, or t
  misc_feature (1231)..(1235): n is a, c, g, or t
  misc_feature (1238)..(1238): n is a, c, g, or t
  misc_feature (1244)..(1244): n is a, c, g, or t
  misc_feature (1246)..(1246): n is a, c, g, or t
  misc_feature (1253)..(1253): n is a, c, g, or t
  misc_feature (1255)..(1256): n is a, c, g, or t
  misc_feature (1259)..(1259): n is a, c, g, or t
  misc_feature (1267)..(1268): n is a, c, g, or t
  misc_feature (1270)..(1271): n is a, c, g, or t
  misc_feature (1273)..(1274): n is a, c, g, or t
  misc_feature (1277)..(1277): n is a, c, g, or t
  misc_feature (1280)..(1280): n is a, c, g, or t
  misc_feature (1282)..(1283): n is a, c, g, or t
  misc_feature (1285)..(1286): n is a, c, g, or t
  misc_feature (1288)..(1290): n is a, c, g, or t
  misc_feature (1292)..(1292): n is a, c, g, or t
  misc_feature (1294)..(1295): n is a, c, g, or t
  misc_feature (1298)..(1302): n is a, c, g, or t
  misc_feature (1306)..(1306): n is a, c, g, or t
  misc_feature (1311)..(1317): n is a, c, g, or t
  misc_feature (1319)..(1319): n is a, c, g, or t
  misc_feature (1326)..(1332): n is a, c, g, or t
  misc_feature (1335)..(1335): n is a, c, g, or t
  misc_feature (1340)..(1341): n is a, c, g, or t
  misc_feature (1346)..(1346): n is a, c, g, or t
  misc_feature (1348)..(1349): n is a, c, g, or t
  misc_feature (1352)..(1352): n is a, c, g, or t
  misc_feature (1356)..(1356): n is a, c, g, or t
  misc_feature (1362)..(1364): n is a, c, g, or t
  misc_feature (1366)..(1366): n is a, c, g, or t
  misc_feature (1368)..(1370): n is a, c, g, or t
atagagaaattactatgagaggatcgcatcaccatcaccatcacggatcctatttaggtgacactatagaatcgtcgacccacgcgtccgatttaaactctggggcaggtcctcgcgtagaacgcggctgtcagatctgccacttcccctgccgagcggcggtgagaagtgtgggaaccggcgctgccaggctcacctgcctccccgccctccgctcccaggaatctgagaattgctctcacacaccaacccagcaacatccgtggagaaaactctcaccagcaactcctttaaaacaccgtcatttcaaaccattgtggtcttcaagcaacaacagcagcacaaaaaaccccaaccaaacaaaactcttgacagaagctgtgacaaccagaaaggatgcctcataaagggggaagactttaactaggggcgcgcagatgtgtgaggccttttattgtgagagtggacagacatccgagatttcagagccccatattcgagccccgtggaatcccgcggcccccagccagagccagcatgcagaacagtcacagcggagtgaatcagctcggtggtgtctttgtcaacgggcggccactgccggactccacccggcagaagattgtagagctagctcacagcggggcccggccgtgcgacatttcccgaattctgcaggtgtccaacggatgtgtgagtaaaattctgggcaggtattacgagactggctccatcagacccagggcaatcggtggtagtaaaccgagagtagcgactccagaagttgtaagcaaaatagcccagtataagcgggagtgcccgtccatctttgcttgggaaatccgagacagattactgtccgagggggtctgtaccaacgataacataccaagcgtaagttcattganaacatctgccctccctgccctaancccaangctctctcntctttacttctnccaacctntntntcantgtctctnaatcngngtcctctcccngctccnanttngtccccnttgnactgggggaanaaaaagaatgccnganttttnttnatgnctggaaatggaatcanngggggagncnttcnttctttgntgntgcaaaaaagggggagncccnggaaggccttnatgaaangaaanaaaccnattgnanttnncnaancccngcnaantttnttgggnnnnnaaaaaaaatntcancggntnnnaaannaaaggnncannnnnttnaaaaangnttaaggnannaangggccccnntnntnnggnttngnngnncnnnangnnccnnnnngggnaaaannnnnnncnaaaaaannnnnnnttnggggnnaaaantnnaangggnaaaaannntntnnn

SEQ ID NO: 432 - DNA, 1373 bp, Homo Sapiens
  misc_feature (2)..(2): n is a, c, g, or t
  misc_feature (757)..(757): n is a, c, g, or t
  misc_feature (799)..(799): n is a, c, g, or t
  misc_feature (893)..(893): n is a, c, g, or t
  misc_feature (907)..(907): n is a, c, g, or t
  misc_feature (944)..(944): n is a, c, g, or t
  misc_feature (951)..(951): n is a, c, g, or t
  misc_feature (954)..(954): n is a, c, g, or t
  misc_feature (961)..(961): n is a, c, g, or t
  misc_feature (973)..(973): n is a, c, g, or t
  misc_feature (979)..(979): n is a, c, g, or t
  misc_feature (1001)..(1001): n is a, c, g, or t
  misc_feature (1017)..(1017): n is a, c, g, or t
  misc_feature (1026)..(1026): n is a, c, g, or t
  misc_feature (1041)..(1041): n is a, c, g, or t
  misc_feature (1047)..(1047): n is a, c, g, or t
  misc_feature (1052)..(1052): n is a, c, g, or t
  misc_feature (1054)..(1054): n is a, c, g, or t
  misc_feature (1069)..(1069): n is a, c, g, or t
  misc_feature (1076)..(1076): n is a, c, g, or t
  misc_feature (1079)..(1079): n is a, c, g, or t
  misc_feature (1084)..(1084): n is a, c, g, or t
  misc_feature (1093)..(1093): n is a, c, g, or t
  misc_feature (1103)..(1103): n is a, c, g, or t
  misc_feature (1109)..(1109): n is a, c, g, or t
  misc_feature (1115)..(1115): n is a, c, g, or t
  misc_feature (1121)..(1121): n is a, c, g, or t
  misc_feature (1124)..(1124): n is a, c, g, or t
  misc_feature (1127)..(1127): n is a, c, g, or t
  misc_feature (1133)..(1134): n is a, c, g, or t
  misc_feature (1141)..(1141): n is a, c, g, or t
  misc_feature (1143)..(1143): n is a, c, g, or t
  misc_feature (1145)..(1145): n is a, c, g, or t
  misc_feature (1161)..(1161): n is a, c, g, or t
  misc_feature (1163)..(1163): n is a, c, g, or t
  misc_feature (1173)..(1173): n is a, c, g, or t
  misc_feature (1177)..(1177): n is a, c, g, or t
  misc_feature (1179)..(1180): n is a, c, g, or t
  misc_feature (1189)..(1189): n is a, c, g, or t
  misc_feature (1191)..(1191): n is a, c, g, or t
  misc_feature (1196)..(1196): n is a, c, g, or t
  misc_feature (1204)..(1204): n is a, c, g, or t
  misc_feature (1207)..(1207): n is a, c, g, or t
  misc_feature (1216)..(1218): n is a, c, g, or t
  misc_feature (1230)..(1230): n is a, c, g, or t
  misc_feature (1234)..(1234): n is a, c, g, or t
  misc_feature (1239)..(1240): n is a, c, g, or t
  misc_feature (1242)..(1242): n is a, c, g, or t
  misc_feature (1253)..(1254): n is a, c, g, or t
  misc_feature (1256)..(1258): n is a, c, g, or t
  misc_feature (1261)..(1269): n is a, c, g, or t
  misc_feature (1273)..(1273): n is a, c, g, or t
  misc_feature (1276)..(1276): n is a, c, g, or t
  misc_feature (1278)..(1278): n is a, c, g, or t
  misc_feature (1280)..(1280): n is a, c, g, or t
  misc_feature (1283)..(1283): n is a, c, g, or t
  misc_feature (1285)..(1285): n is a, c, g, or t
  misc_feature (1289)..(1289): n is a, c, g, or t
  misc_feature (1297)..(1297): n is a, c, g, or t
  misc_feature (1305)..(1306): n is a, c, g, or t
  misc_feature (1308)..(1308): n is a, c, g, or t
  misc_feature (1318)..(1320): n is a, c, g, or t
  misc_feature (1328)..(1328): n is a, c, g, or t
  misc_feature (1333)..(1336): n is a, c, g, or t
  misc_feature (1344)..(1347): n is a, c, g, or t
  misc_feature (1350)..(1351): n is a, c, g, or t
  misc_feature (1362)..(1362): n is a, c, g, or t
  misc_feature (1369)..(1369): n is a, c, g, or t
  misc_feature (1371)..(1371): n is a, c, g, or t
tnatagagaaattactatgagaggatcgcatcaccatcaccatcacggatcctatttaggtgacactatagaatcgtcgacccacgcgtccggccggagcggcggcgggcgggccgagcagccggggcagccgcgcgtgggcatccacgggcgccgagcctccgtccgtgtctctatccctcccgggcctttgtcagcgcgcccgctgggagcggggccgagagcgccggttccagtcagacagccccgcaggtcagcggccgggccgagggcgccagagggggccatgtcgtaccagggcaagaagagcatcccgcacatcacgagtgaccgactcctcatcaaaggtggacggatcatcaacgatgaccaatccctttatgctgacgtctacctggaggatggacttatcaaacaaataggagagaacttaatcgttcctggtggagtgaagaccattgaagccaacgggcggatggttattcccggaggtattgatgtcaacacgtacctgcagaagccctcccaggggatgactgcggctgatgacttcttccaagggaccagggcggcactggtgggcgggaccacgatgatcattgaccatgttgttcctgaacctgggtccagcctactgacctctttcgagaagtggcacgaagcagctgacaccaaatcctgctgtgattactccctccacgtggacatcacaagctggtacgatggcgttcgggaggagctggaggtgctggtgcangacaaaggcgtcaattccttccaagtctacatggcctataangatgtctaccaaatgtccgacagccagctctatgaagcctttaccttccttaagggcctgggagctgtgatcttggtccatgcaaaaaatgganatttgatagctcangaaacaaaaccgaattctggaaatgggcatcacgggntcccganggncatgccntgaacaaacttnaaaaantggaagccgaagcggtgttccnggccattccccattgnggggccggnatcaactgccctgtntaatcnccaangncatgaacaaaaatgnacccaanttnttccntttggcaanaaaaaaaggnccctantttttngaaaanccnttncccccnncttgggnancnatggcccccctattgnanaaaaattggncaangnngggggtttntnaattnccctcccnganccggacctnnnaccccaaatttnaccncctanngnctggggaattnnannnaannnnnnnnntttnctnananttncnaaangggggaanaaatttcnntntccgggttannnaaaaaaanaaaannnnttgaaaannnnttnnaaaaaaaaaanttttttncncc

SEQ ID NO: 433 - DNA, 1348 bp, Homo Sapiens
  misc_feature (830)..(830): n is a, c, g, or t
  misc_feature (850)..(850): n is a, c, g, or t
  misc_feature (870)..(870): n is a, c, g, or t
  misc_feature (880)..(880): n is a, c, g, or t
  misc_feature (891)..(891): n is a, c, g, or t
  misc_feature (900)..(900): n is a, c, g, or t
  misc_feature (904)..(904): n is a, c, g, or t
  misc_feature (909)..(909): n is a, c, g, or t
  misc_feature (925)..(925): n is a, c, g, or t
  misc_feature (927)..(927): n is a, c, g, or t
  misc_feature (931)..(931): n is a, c, g, or t
  misc_feature (935)..(935): n is a, c, g, or t
  misc_feature (937)..(937): n is a, c, g, or t
  misc_feature (940)..(940): n is a, c, g, or t
  misc_feature (943)..(943): n is a, c, g, or t
  misc_feature (950)..(950): n is a, c, g, or t
  misc_feature (957)..(957): n is a, c, g, or t
  misc_feature (966)..(966): n is a, c, g, or t
  misc_feature (968)..(968): n is a, c, g, or t
  misc_feature (972)..(972): n is a, c, g, or t
  misc_feature (976)..(976): n is a, c, g, or t
  misc_feature (986)..(986): n is a, c, g, or t
  misc_feature (993)..(993): n is a, c, g, or t
  misc_feature (1004)..(1005): n is a, c, g, or t
  misc_feature (1008)..(1008): n is a, c, g, or t
  misc_feature (1010)..(1011): n is a, c, g, or t
  misc_feature (1014)..(1014): n is a, c, g, or t
  misc_feature (1029)..(1029): n is a, c, g, or t
  misc_feature (1033)..(1034): n is a, c, g, or t
  misc_feature (1040)..(1040): n is a, c, g, or t
  misc_feature (1044)..(1044): n is a, c, g, or t
  misc_feature (1047)..(1047): n is a, c, g, or t
  misc_feature (1052)..(1052): n is a, c, g, or t
  misc_feature (1059)..(1059): n is a, c, g, or t
  misc_feature (1061)..(1061): n is a, c, g, or t
  misc_feature (1063)..(1063): n is a, c, g, or t
  misc_feature (1069)..(1070): n is a, c, g, or t
  misc_feature (1081)..(1081): n is a, c, g, or t
  misc_feature (1083)..(1084): n is a, c, g, or t
  misc_feature (1087)..(1088): n is a, c, g, or t
  misc_feature (1101)..(1102): n is a, c, g, or t
  misc_feature (1109)..(1110): n is a, c, g, or t
  misc_feature (1115)..(1115): n is a, c, g, or t
  misc_feature (1122)..(1123): n is a, c, g, or t
  misc_feature (1129)..(1130): n is a, c, g, or t
  misc_feature (1132)..(1135): n is a, c, g, or t
  misc_feature (1138)..(1138): n is a, c, g, or t
  misc_feature (1148)..(1155): n is a, c, g, or t
  misc_feature (1159)..(1160): n is a, c, g, or t
  misc_feature (1169)..(1169): n is a, c, g, or t
  misc_feature (1174)..(1174): n is a, c, g, or t
  misc_feature (1184)..(1184): n is a, c, g, or t
  misc_feature (1186)..(1186): n is a, c, g, or t
  misc_feature (1192)..(1192): n is a, c, g, or t
  misc_feature (1195)..(1196): n is a, c, g, or t
  misc_feature (1205)..(1208): n is a, c, g, or t
  misc_feature (1212)..(1217): n is a, c, g, or t
  misc_feature (1222)..(1222): n is a, c, g, or t
  misc_feature (1230)..(1230): n is a, c, g, or t
  misc_feature (1234)..(1234): n is a, c, g, or t
  misc_feature (1238)..(1243): n is a, c, g, or t
  misc_feature (1247)..(1249): n is a, c, g, or t
  misc_feature (1251)..(1254): n is a, c, g, or t
  misc_feature (1260)..(1262): n is a, c, g, or t
  misc_feature (1273)..(1273): n is a, c, g, or t
  misc_feature (1275)..(1276): n is a, c, g, or t
  misc_feature (1282)..(1283): n is a, c, g, or t
  misc_feature (1286)..(1286): n is a, c, g, or t
  misc_feature (1289)..(1297): n is a, c, g, or t
  misc_feature (1300)..(1306): n is a, c, g, or t
  misc_feature (1310)..(1313): n is a, c, g, or t
  misc_feature (1318)..(1318): n is a, c, g, or t
  misc_feature (1322)..(1325): n is a, c, g, or t
  misc_feature (1327)..(1327): n is a, c, g, or t
  misc_feature (1335)..(1335): n is a, c, g, or t
  misc_feature (1337)..(1339): n is a, c, g, or t
  misc_feature (1342)..(1342): n is a, c, g, or t
  misc_feature (1347)..(1348): n is a, c, g, or t
taatagagaaattactatgagaggatcgcatcaccatcaccatcacggatcctatttaggtgacactatagaatcgtcgacccacgcgtccggtagttttctctgcgcgtgtgcgttttccctcctcccccgccctcagggtccacggccaccatggcgtattaggggcagcagtgcctgcggcagcattggcctttgcagcggcggcagcagcaccaggctctgcagcggcaacccccagcggcttaagccatggcgcttctcacggcattcagcagcagcgttgctgtaaccgacaaagacaccttcgaattaagcacattcctcgattccagcaaagcaccgcaacatgaccgaaatgagcttcctgagcagcgaggtgttggtgggggacttgatgtcccccttcgacccgtcgggtttgggggctgaagaaagcctaggtctcttagatgattacctggaggtggccaagcacttcaaacctcatgggttctccagcgacaaggctaaggcgggctcctccgaatggctggctgtggatgggttggtcagtccctccaacaacagcaaggaggatgccttctccgggacagattggatgttggagaaaatggatttgaaggagttcgacttggatgccctgttgggtatagatgacctggaaaccatgccagatgaccttctgaccacgttggatgacacttgtgatctctttgcccccctagtccaggagactaataagcagcccccccagacggtgaacccaattggccatctcccaaaaagtttaacaaaacccgaccaggttgcccccttcaccttcttanaacctcttcccctttcccanggggtcctgtcctccactcnaaatcattcnttaatttaaanctggggcangaantgganatcactgaaaggaaanangaanccanantanacngcttaanttgccangatccctcnangcanaaangaagaaaaanccccttnaaaaaagaaannggnanntgnatgaaccccaaatcntatnnggggtncccncanaaaanccctttnananggggtnnccaaaaaaaancnnccnntcccagggtttcnngggggtnngcccntccaaanntaaaanncnnnnggnaaaaaaaggnnnnnnnnaaannaaagggggnaaaanggaaaaaaantnaaaaanggnnaaaaaaaannnncccnnnnnnccccnaaaaaaangggnaaannnnnntttnnngnnnnaaaaannnaaaaaaaaaancnnaaaaannggnttnnnnnnnnnaannnnnnnaaannnnaaaancccnnnngngaaaaaancnnnttnaaaann

SEQ ID NO: 434 - DNA, 1157 bp, Homo Sapiens
  misc_feature (861)..(861): n is a, c, g, or t
  misc_feature (874)..(874): n is a, c, g, or t
  misc_feature (901)..(901): n is a, c, g, or t
  misc_feature (927)..(927): n is a, c, g, or t
  misc_feature (934)..(934): n is a, c, g, or t
  misc_feature (950)..(950): n is a, c, g, or t
  misc_feature (970)..(970): n is a, c, g, or t
  misc_feature (1005)..(1005): n is a, c, g, or t
  misc_feature (1031)..(1031): n is a, c, g, or t
  misc_feature (1033)..(1033): n is a, c, g, or t
  misc_feature (1045)..(1046): n is a, c, g, or t
  misc_feature (1061)..(1062): n is a, c, g, or t
  misc_feature (1064)..(1064): n is a, c, g, or t
  misc_feature (1067)..(1067): n is a, c, g, or t
  misc_feature (1076)..(1078): n is a, c, g, or t
  misc_feature (1093)..(1093): n is a, c, g, or t
  misc_feature (1099)..(1099): n is a, c, g, or t
  misc_feature (1103)..(1103): n is a, c, g, or t
  misc_feature (1105)..(1105): n is a, c, g, or t
  misc_feature (1116)..(1116): n is a, c, g, or t
  misc_feature (1120)..(1120): n is a, c, g, or t
  misc_feature (1123)..(1123): n is a, c, g, or t
  misc_feature (1125)..(1125): n is a, c, g, or t
  misc_feature (1128)..(1128): n is a, c, g, or t
  misc_feature (1135)..(1135): n is a, c, g, or t
  misc_feature (1142)..(1142): n is a, c, g, or t
  misc_feature (1144)..(1144): n is a, c, g, or t
  misc_feature (1147)..(1147): n is a, c, g, or t
  misc_feature (1154)..(1154): n is a, c, g, or t
  misc_feature (1157)..(1157): n is a, c, g, or t
ttagagaaaattactatgagaggatcgcatcaccatcaccatcacggatcctatttaggtgacactatagaatcgtcgacccacgcgtccgggagagagcgagctgagtggttgtgtggtcgcgtctcggaaaccggtagcgcttgcagcatggctgaccaactgactgaagagcagattgcagaattcaaagaagctttttcactatttgacaaagatggtgatggaactataacaacaaaggaattgggaactgtaatgagatctcttgggcagaatcccacagaagcagagttacaggacatgattaatgaagtagatgctgatggtaatggcacaattgacttccctgaatttctgacaatgatggcaagaaaaatgaaagacacagacagtgaagaagaaattagagaagcattccgtgtgtttgataaggatggcaatggctatattagtgctgcagaacttcgccatgtgatgacaaaccttggagagaagttaacagatgaagaagttgatgaaatgatcagggaagcagatattgatggtgatggtcaagtaaactatgaagagtttgtacaaatgatgacagcaaagtgaagaccttgtacagaatgtgttaaatttcttgtacaaaattgtttatttgccttttctttgtttgtaacttatctgtaaaaggtttctccctactgtcaaaaaaatatgcatgtatagtaattaggacttcattcctccatgttttcttcccttatcttactgtcattgtcctaaaaccttattttagaaaattgatcaagtaacatgttgcatgtggcttactctggatatatctaagcccttctgcacatctaaacttanatggagttggtcnaaatgagggaacatctgggttatgccnttttttaaagtagttttctttagganctgtcancatgttgttgttgaantgtggagttgtacctctgcntggactatggacagtcaacaatatgtacttaaaanttgccctattgcaaaacgggtgtatnanccaggtaccccnncccctatttttttgnncngcngggcccggnnnccaaaaacattttcnttttantggnancttgccttttnaacnttngnttnacccccnttaaaancngcntttgggnccn

SEQ ID NO: 435 - DNA, 1407 bp, Homo Sapiens
  misc_feature (90)..(90): n is a, c, g, or t
  misc_feature (94)..(94): n is a, c, g, or t
  misc_feature (96)..(97): n is a, c, g, or t
  misc_feature (100)..(100): n is a, c, g, or t
  misc_feature (103)..(104): n is a, c, g, or t
  misc_feature (113)..(113): n is a, c, g, or t
  misc_feature (118)..(119): n is a, c, g, or t
  misc_feature (135)..(135): n is a, c, g, or t
  misc_feature (140)..(140): n is a, c, g, or t
  misc_feature (143)..(143): n is a, c, g, or t
  misc_feature (152)..(152): n is a, c, g, or t
  misc_feature (155)..(155): n is a, c, g, or t
  misc_feature (171)..(171): n is a, c, g, or t
  misc_feature (175)..(175): n is a, c, g, or t
  misc_feature (182)..(182): n is a, c, g, or t
  misc_feature (186)..(186): n is a, c, g, or t
  misc_feature (195)..(195): n is a, c, g, or t
  misc_feature (203)..(204): n is a, c, g, or t
  misc_feature (206)..(206): n is a, c, g, or t
  misc_feature (211)..(212): n is a, c, g, or t
  misc_feature (214)..(214): n is a, c, g, or t
  misc_feature (246)..(246): n is a, c, g, or t
  misc_feature (248)..(248): n is a, c, g, or t
  misc_feature (251)..(251): n is a, c, g, or t
  misc_feature (254)..(254): n is a, c, g, or t
  misc_feature (263)..(263): n is a, c, g, or t
  misc_feature (268)..(268): n is a, c, g, or t
  misc_feature (275)..(276): n is a, c, g, or t
  misc_feature (288)..(288): n is a, c, g, or t
  misc_feature (291)..(291): n is a, c, g, or t
  misc_feature (298)..(298): n is a, c, g, or t
  misc_feature (301)..(301): n is a, c, g, or t
  misc_feature (305)..(305): n is a, c, g, or t
  misc_feature (308)..(308): n is a, c, g, or t
  misc_feature (311)..(311): n is a, c, g, or t
  misc_feature (313)..(313): n is a, c, g, or t
  misc_feature (316)..(316): n is a, c, g, or t
  misc_feature (319)..(319): n is a, c, g, or t
  misc_feature (327)..(327): n is a, c, g, or t
  misc_feature (329)..(329): n is a, c, g, or t
  misc_feature (331)..(331): n is a, c, g, or t
  misc_feature (334)..(334): n is a, c, g, or t
  misc_feature (341)..(343): n is a, c, g, or t
  misc_feature (347)..(347): n is a, c, g, or t
  misc_feature (351)..(353): n is a, c, g, or t
  misc_feature (356)..(356): n is a, c, g, or t
  misc_feature (358)..(359): n is a, c, g, or t
  misc_feature (374)..(374): n is a, c, g, or t
  misc_feature (378)..(378): n is a, c, g, or t
  misc_feature (382)..(384): n is a, c, g, or t
  misc_feature (406)..(406): n is a, c, g, or t
  misc_feature (410)..(410): n is a, c, g, or t
  misc_feature (418)..(418): n is a, c, g, or t
  misc_feature (430)..(430): n is a, c, g, or t
  misc_feature (434)..(434): n is a, c, g, or t
  misc_feature (436)..(437): n is a, c, g, or t
  misc_feature (449)..(449): n is a, c, g, or t
  misc_feature (453)..(453): n is a, c, g, or t
  misc_feature (455)..(455): n is a, c, g, or t
  misc_feature (460)..(460): n is a, c, g, or t
  misc_feature (469)..(469): n is a, c, g, or t
  misc_feature (472)..(473): n is a, c, g, or t
  misc_feature (476)..(476): n is a, c, g, or t
  misc_feature (486)..(486): n is a, c, g, or t
  misc_feature (494)..(494): n is a, c, g, or t
  misc_feature (498)..(498): n is a, c, g, or t
  misc_feature (501)..(501): n is a, c, g, or t
  misc_feature (503)..(503): n is a, c, g, or t
  misc_feature (506)..(506): n is a, c, g, or t
  misc_feature (510)..(513): n is a, c, g, or t
  misc_feature (516)..(516): n is a, c, g, or t
  misc_feature (518)..(518): n is a, c, g, or t
  misc_feature (521)..(521): n is a, c, g, or t
  misc_feature (523)..(524): n is a, c, g, or t
  misc_feature (526)..(526): n is a, c, g, or t
  misc_feature (532)..(533): n is a, c, g, or t
  misc_feature (535)..(535): n is a, c, g, or t
  misc_feature (538)..(539): n is a, c, g, or t
  misc_feature (549)..(549): n is a, c, g, or t
  misc_feature (559)..(559): n is a, c, g, or t
  misc_feature (698)..(698): n is a, c, g, or t
  misc_feature (713)..(713): n is a, c, g, or t
  misc_feature (716)..(716): n is a, c, g, or t
  misc_feature (744)..(746): n is a, c, g, or t
  misc_feature (758)..(758): n is a, c, g, or t
  misc_feature (779)..(779): n is a, c, g, or t
  misc_feature (790)..(790): n is a, c, g, or t
  misc_feature (802)..(802): n is a, c, g, or t
  misc_feature (810)..(811): n is a, c, g, or t
  misc_feature (847)..(847): n is a, c, g, or t
  misc_feature (863)..(863): n is a, c, g, or t
  misc_feature (869)..(869): n is a, c, g, or t
  misc_feature (875)..(876): n is a, c, g, or t
  misc_feature (882)..(882): n is a, c, g, or t
  misc_feature (887)..(887): n is a, c, g, or t
  misc_feature (895)..(895): n is a, c, g, or t
  misc_feature (900)..(901): n is a, c, g, or t
  misc_feature (923)..(923): n is a, c, g, or t
  misc_feature (925)..(925): n is a, c, g, or t
  misc_feature (931)..(932): n is a, c, g, or t
  misc_feature (937)..(937): n is a, c, g, or t
  misc_feature (950)..(950): n is a, c, g, or t
  misc_feature (953)..(953): n is a, c, g, or t
  misc_feature (955)..(955): n is a, c, g, or t
  misc_feature (963)..(963): n is a, c, g, or t
  misc_feature (967)..(967): n is a, c, g, or t
  misc_feature (970)..(970): n is a, c, g, or t
  misc_feature (976)..(977): n is a, c, g, or t
  misc_feature (994)..(994): n is a, c, g, or t
  misc_feature (1000)..(1000): n is a, c, g, or t
  misc_feature (1002)..(1003): n is a, c, g, or t
  misc_feature (1014)..(1014): n is a, c, g, or t
  misc_feature (1019)..(1019): n is a, c, g, or t
  misc_feature (1028)..(1028): n is a, c, g, or t
  misc_feature (1030)..(1030): n is a, c, g, or t
  misc_feature (1035)..(1035): n is a, c, g, or t
  misc_feature (1042)..(1042): n is a, c, g, or t
  misc_feature (1055)..(1055): n is a, c, g, or t
  misc_feature (1057)..(1057): n is a, c, g, or t
  misc_feature (1059)..(1059): n is a, c, g, or t
  misc_feature (1061)..(1061): n is a, c, g, or t
  misc_feature (1064)..(1064): n is a, c, g, or t
  misc_feature (1068)..(1068): n is a, c, g, or t
  misc_feature (1071)..(1071): n is a, c, g, or t
  misc_feature (1073)..(1075): n is a, c, g, or t
  misc_feature (1078)..(1078): n is a, c, g, or t
  misc_feature (1083)..(1084): n is a, c, g, or t
  misc_feature (1086)..(1087): n is a, c, g, or t
  misc_feature (1089)..(1089): n is a, c, g, or t
  misc_feature (1092)..(1093): n is a, c, g, or t
  misc_feature (1097)..(1098): n is a, c, g, or t
  misc_feature (1105)..(1105): n is a, c, g, or t
  misc_feature (1111)..(1111): n is a, c, g, or t
  misc_feature (1118)..(1118): n is a, c, g, or t
  misc_feature (1121)..(1123): n is a, c, g, or t
  misc_feature (1125)..(1127): n is a, c, g, or t
  misc_feature (1129)..(1129): n is a, c, g, or t
  misc_feature (1131)..(1131): n is a, c, g, or t
  misc_feature (1136)..(1136): n is a, c, g, or t
  misc_feature (1141)..(1142): n is a, c, g, or t
  misc_feature (1145)..(1148): n is a, c, g, or t
  misc_feature (1161)..(1161): n is a, c, g, or t
  misc_feature (1166)..(1166): n is a, c, g, or t
  misc_feature (1168)..(1168): n is a, c, g, or t
  misc_feature (1170)..(1170): n is a, c, g, or t
  misc_feature (1173)..(1173): n is a, c, g, or t
  misc_feature (1181)..(1181): n is a, c, g, or t
  misc_feature (1188)..(1188): n is a, c, g, or t
  misc_feature (1190)..(1190): n is a, c, g, or t
  misc_feature (1195)..(1196): n is a, c, g, or t
  misc_feature (1201)..(1202): n is a, c, g, or t
  misc_feature (1207)..(1207): n is a, c, g, or t
  misc_feature (1210)..(1211): n is a, c, g, or t
  misc_feature (1214)..(1215): n is a, c, g, or t
  misc_feature (1219)..(1221): n is a, c, g, or t
  misc_feature (1229)..(1229): n is a, c, g, or t
  misc_feature (1234)..(1234): n is a, c, g, or t
  misc_feature (1236)..(1236): n is a, c, g, or t
  misc_feature (1243)..(1243): n is a, c, g, or t
  misc_feature (1246)..(1246): n is a, c, g, or t
  misc_feature (1254)..(1254): n is a, c, g, or t
  misc_feature (1260)..(1260): n is a, c, g, or t
  misc_feature (1262)..(1262): n is a, c, g, or t
  misc_feature (1264)..(1271): n is a, c, g, or t
  misc_feature (1275)..(1275): n is a, c, g, or t
  misc_feature (1292)..(1295): n is a, c, g, or t
  misc_feature (1297)..(1298): n is a, c, g, or t
  misc_feature (1303)..(1310): n is a, c, g, or t
  misc_feature (1312)..(1313): n is a, c, g, or t
  misc_feature (1317)..(1325): n is a, c, g, or t
  misc_feature (1327)..(1328): n is a, c, g, or t
  misc_feature (1331)..(1332): n is a, c, g, or t
  misc_feature (1334)..(1341): n is a, c, g, or t
  misc_feature (1346)..(1346): n is a, c, g, or t
  misc_feature (1348)..(1356): n is a, c, g, or t
  misc_feature (1360)..(1370): n is a, c, g, or t
  misc_feature (1373)..(1376): n is a, c, g, or t
  misc_feature (1378)..(1378): n is a, c, g, or t
  misc_feature (1380)..(1382): n is a, c, g, or t
  misc_feature (1385)..(1399): n is a, c, g, or t
  misc_feature (1401)..(1401): n is a, c, g, or t
  misc_feature (1403)..(1406): n is a, c, g, or t
tagagaaattactatgagaggatcgcatcaccatcaccatcacggatcctatttaggtgacactatagaatcgtcgacccacgcgtccgngcangnncgnagnncgagtgtcnccgcnntggaattcgccgcagntctgncgngcgcatggngtnggcgcaatgtggtggnggangtgctgnggancccgcgcgntgggcagnntntgcanntnatggacgcctcctggtacctgccgaaactggngngcnacncgcgactcnaattnaaggaannccaaatcccggncgncgatttnttncacntcnacnantgnagnaacagaancncnccntacaacnnnatgntgcnnnggncnnagcatttcatgaagnaatnatgnnncctgatcgtgagcgcggccacncacntaatgatntacaattccagngacnanngcctctactccncccngngcgtntggtggatnttnnttnccttcggccnccacgacntgtnacngnttnatgnnnnccncngcnanngnttgcannanaanntcccgctcanctccggcaanagccaacctgctcccgccgagttccgcgctcagctcgaccccgccttcatcaagacctacgaggacatcaaggagaacctggaatcccggcgcttccaggtggtggactcccgagccactggcaggttccgcggcaccnagcccgagccccganacngcattgaacctggtcacatcccaggtannntgaacatccccntcacagacttcctgagccaanatgggctgganaagagccctgangagatccnncatctgttccaggagaaaaaagtggaactgtctaanccactggtggccaaantgtgtntctggnntcacancctgncacgtggnactanngcctacctctgcggcaagcaanangtgccnntttanaaaggcttcctgnaangnaatggtanatgntcncccggnncttaaaattttttttcnaaaggncnnggggaaaaacnccctnaatttgggnangaaanaaaaaanctcaggtgatgcngncnanaanaatnccngnnntgnaaccnntnntntgnnttannaaaaaantttttnttccttnaannnannngnanttggnttgannttnnnnccaaaaattcctnaattntngntcnaaaaaacngaaaaantncaaannatttnnaaaanaannccnnccannnccccgggntaacngnccccccnttntttttttnaaaaanancnnnnnnnntttnaaaaaaaaaaaaaaaannnngnnccccnnnnnnnnanntttnnnnnnnnntnnaannannnnnnnnttttnannnnnnnnntttnnnnnnnnnnnaannnnanannnaannnnnnnnnnnnnnnancnnnnc

SEQ ID NO: 436 - DNA, 1297 bp, Homo Sapiens
  misc_feature (833)..(833): n is a, c, g, or t
  misc_feature (904)..(904): n is a, c, g, or t
  misc_feature (1006)..(1006): n is a, c, g, or t
  misc_feature (1013)..(1013): n is a, c, g, or t
  misc_feature (1016)..(1016): n is a, c, g, or t
  misc_feature (1028)..(1028): n is a, c, g, or t
  misc_feature (1034)..(1034): n is a, c, g, or t
  misc_feature (1049)..(1049): n is a, c, g, or t
  misc_feature (1052)..(1052): n is a, c, g, or t
  misc_feature (1065)..(1065): n is a, c, g, or t
  misc_feature (1082)..(1082): n is a, c, g, or t
  misc_feature (1085)..(1085): n is a, c, g, or t
  misc_feature (1089)..(1089): n is a, c, g, or t
  misc_feature (1095)..(1095): n is a, c, g, or t
  misc_feature (1099)..(1099): n is a, c, g, or t
  misc_feature (1118)..(1119): n is a, c, g, or t
  misc_feature (1124)..(1124): n is a, c, g, or t
  misc_feature (1128)..(1128): n is a, c, g, or t
  misc_feature (1135)..(1135): n is a, c, g, or t
  misc_feature (1146)..(1146): n is a, c, g, or t
  misc_feature (1151)..(1151): n is a, c, g, or t
  misc_feature (1158)..(1158): n is a, c, g, or t
  misc_feature (1165)..(1165): n is a, c, g, or t
  misc_feature (1174)..(1174): n is a, c, g, or t
  misc_feature (1179)..(1179): n is a, c, g, or t
  misc_feature (1189)..(1190): n is a, c, g, or t
  misc_feature (1198)..(1272): n is a, c, g, or t
  misc_feature (1283)..(1284): n is a, c, g, or t
  misc_feature (1286)..(1287): n is a, c, g, or t
  misc_feature (1289)..(1290): n is a, c, g, or t
  misc_feature (1297)..(1297): n is a, c, g, or t
aatagagaaattactatgagaggatcgcatcaccatcaccatcacggatcctatttaggtgacactatagaatcgtcgacccacgcgtccggcggttctcgacgtgccgccaatcttcgaacgcaggtctgtgatcatccgcagactccgaaaaagggttcgaggaacgcgcctgctcccctcgtcgcagtttccagcccgacgagcttgttttgtcccggactcggtgcccctgtagacaatggccctcgtgtctgccgattcccgcattgcagaacttctcacagagctccatcagctgatcaaacaaacccaggaagagcgttcgcggagcgaacacaacttagtgaacatccagaagacccatgagcggatgcagacagagaacaagatttctccctattaccggacaaagctgcgtggcctctacacaaccgccaaggccgatgcagaggctgagtgcaacatccttcggaaagctctggacaagatcgcggaaatcaagtctctgttggaagagaggcggattgcggccaagattgccggtctctacaatgactcggagccaccccggaagaccatgcgcagaggggtgctgatgaccctgctgcagcagtcggccatgaccctgcccctgtggatcgggaagcctggtgacaagcccccacccctctgtggggccatccctgcctcaggagactacgtggccagacctggagacaaggtggctgcccgggtgaaggccgtggatggggacgagcagtggatcctggccgaggtggtcagttacagccatgccaccaacaagtatgaggtagatgacatcgatgaanaaggcaaagagagacacaccctgagccggcgccgtgtcatcccgctgccccagtggaaggccaacccgganacggaccctgaggccttgttccaaaaggagcagctcgtgctggcctgtatccccaaactacctgcttctaccgcgccctgatccatgcgcccccacagcggncccagangantactcggtctgnttgaanaccctcctaagcaanggntattcccctcccnccaaggggctcaaaggnacngggngcttgnaagnacccaaaaaaatggatgcnnctggnaaanccccctnccccaagaaanagggnagaaaanaaaaaangggtggatnaaacnattccccctnnaaaaaaannnnnnnnnnnnnnnnnnnnnnnnnnnnnnnnnnnnnnnnnnnnnnnnnnnnnnnnnnnnnnnnnnnnnnnnnnngggggcccccnnanngnntaatttn

SEQ ID NO: 437 - DNA, 1409 bp, Homo Sapiens
  misc_feature (924)..(924): n is a, c, g, or t
  misc_feature (945)..(945): n is a, c, g, or t
  misc_feature (961)..(961): n is a, c, g, or t
  misc_feature (963)..(963): n is a, c, g, or t
  misc_feature (983)..(983): n is a, c, g, or t
  misc_feature (1016)..(1016): n is a, c, g, or t
  misc_feature (1050)..(1050): n is a, c, g, or t
  misc_feature (1052)..(1052): n is a, c, g, or t
  misc_feature (1055)..(1055): n is a, c, g, or t
  misc_feature (1057)..(1057): n is a, c, g, or t
  misc_feature (1088)..(1088): n is a, c, g, or t
  misc_feature (1100)..(1100): n is a, c, g, or t
  misc_feature (1114)..(1114): n is a, c, g, or t
  misc_feature (1118)..(1118): n is a, c, g, or t
  misc_feature (1123)..(1124): n is a, c, g, or t
  misc_feature (1131)..(1132): n is a, c, g, or t
  misc_feature (1134)..(1134): n is a, c, g, or t
  misc_feature (1137)..(1137): n is a, c, g, or t
  misc_feature (1140)..(1141): n is a, c, g, or t
  misc_feature (1144)..(1144): n is a, c, g, or t
  misc_feature (1149)..(1150): n is a, c, g, or t
  misc_feature (1152)..(1152): n is a, c, g, or t
  misc_feature (1156)..(1157): n is a, c, g, or t
  misc_feature (1161)..(1161): n is a, c, g, or t
  misc_feature (1166)..(1166): n is a, c, g, or t
  misc_feature (1169)..(1169): n is a, c, g, or t
  misc_feature (1181)..(1181): n is a, c, g, or t
  misc_feature (1186)..(1186): n is a, c, g, or t
  misc_feature (1189)..(1190): n is a, c, g, or t
  misc_feature (1192)..(1193): n is a, c, g, or t
  misc_feature (1197)..(1198): n is a, c, g, or t
  misc_feature (1212)..(1212): n is a, c, g, or t
  misc_feature (1214)..(1215): n is a, c, g, or t
  misc_feature (1218)..(1218): n is a, c, g, or t
  misc_feature (1229)..(1229): n is a, c, g, or t
  misc_feature (1232)..(1232): n is a, c, g, or t
  misc_feature (1234)..(1235): n is a, c, g, or t
  misc_feature (1240)..(1240): n is a, c, g, or t
  misc_feature (1245)..(1245): n is a, c, g, or t
  misc_feature (1250)..(1250): n is a, c, g, or t
  misc_feature (1253)..(1253): n is a, c, g, or t
  misc_feature (1261)..(1261): n is a, c, g, or t
  misc_feature (1266)..(1272): n is a, c, g, or t
  misc_feature (1274)..(1275): n is a, c, g, or t
  misc_feature (1278)..(1278): n is a, c, g, or t
  misc_feature (1282)..(1284): n is a, c, g, or t
  misc_feature (1287)..(1288): n is a, c, g, or t
  misc_feature (1294)..(1294): n is a, c, g, or t
  misc_feature (1299)..(1300): n is a, c, g, or t
  misc_feature (1303)..(1305): n is a, c, g, or t
  misc_feature (1311)..(1313): n is a, c, g, or t
  misc_feature (1319)..(1320): n is a, c, g, or t
  misc_feature (1322)..(1323): n is a, c, g, or t
  misc_feature (1325)..(1325): n is a, c, g, or t
  misc_feature (1332)..(1332): n is a, c, g, or t
  misc_feature (1339)..(1341): n is a, c, g, or t
  misc_feature (1344)..(1344): n is a, c, g, or t
  misc_feature (1350)..(1350): n is a, c, g, or t
  misc_feature (1355)..(1355): n is a, c, g, or t
  misc_feature (1359)..(1361): n is a, c, g, or t
  misc_feature (1366)..(1366): n is a, c, g, or t
  misc_feature (1369)..(1372): n is a, c, g, or t
  misc_feature (1377)..(1377): n is a, c, g, or t
  misc_feature (1379)..(1383): n is a, c, g, or t
  misc_feature (1386)..(1388): n is a, c, g, or t
  misc_feature (1395)..(1399): n is a, c, g, or t
  misc_feature (1402)..(1404): n is a, c, g, or t
  misc_feature (1407)..(1409): n is a, c, g, or t
attagagagattactatgagaggatcgcatcaccatcaccatcacggatcctatttaggtgacactatagaatcgtcgacccacgcgtccgataaccttgcagtcctttatggtaaaagagggaagtacaaagaagcagagccgttgtgtaaaagagctctggaaatccgagaaaaggttttggggaaggatcaccccgatgttgccaagcagttaaataacttggccttactgtgccagaaccagggcaagtatgaagaagtagaatattattatcaaagagccctcgagatctaccagacaaaactgggacctgatgaccccaacgtggctaagacgaaaaataacctggcatcctgctatttgaaacaaggaaagttcaagcaagcagaaacactgtacaaagagattctcactcgtgcacatgaaagggagtttggttctgtagatgatgaaaataaacccatctggatgcatgctgaagaaagagaagaatgcaaaggaaagcaaaaggatgggacatcttttggagagtatggcggctggtacaaagcctgcaaagttgatagtccaactgttacaaccactctaaaaaaccttggggcactttacagacgtcaaggcaaatttgaagctgcagaaacgttagaagaagctgctatgaggtctcgtaaacagcgaagtatctcagaaatacctaagaaaatcttaagtgctaatgggtcaaaccattttcccctgcctggctcacagggtcttgacaatgttcacaaacagagggtggcagaagtgctcaatgaccctgagaacatggagaagcgcaggagccgtgagagcctcaacgtggacgtggtcaagtacgagagtggccctgacggaggggaggaaatgaggaaaatgaagctcgggctggttaactgactngctcagcgtcccatggcctanccgcccgtgactctcncnctgtctcctgcatgacgggnggggcctcccgcagcttcccttctctctccagngctgcccgctgtgtctagcaccctctaggatctngncananctgcccccctctgggaactggccattccttncggggctgctgncctttttggggggntccngattnnggtaccnngnacnttnnccnaattnncnttannaaanaaacnggnttaaaaaacccntttcnggnnanncccnnttttaaatttaaancnnttncttttcccttnggnannggganttaanttccncangggttttncaggnnnnnnngnnccntttnnnaannaccctnaaaannggnnncccccnnncccggnntnnanccggggnccccccnnnccngccccnaaaancccnnnatttnggnnnnggggnannnnnccnnntttcccnnnnnggnnnggnnn

SEQ ID NO: 438 - DNA, 1448 bp, Homo Sapiens
  misc_feature (93)..(93): n is a, c, g, or t
  misc_feature (104)..(105): n is a, c, g, or t
  misc_feature (117)..(117): n is a, c, g, or t
  misc_feature (120)..(120): n is a, c, g, or t
  misc_feature (125)..(125): n is a, c, g, or t
  misc_feature (127)..(127): n is a, c, g, or t
  misc_feature (132)..(132): n is a, c, g, or t
  misc_feature (141)..(141): n is a, c, g, or t
  misc_feature (174)..(174): n is a, c, g, or t
  misc_feature (203)..(203): n is a, c, g, or t
  misc_feature (208)..(208): n is a, c, g, or t
  misc_feature (213)..(213): n is a, c, g, or t
  misc_feature (272)..(272): n is a, c, g, or t
  misc_feature (280)..(280): n is a, c, g, or t
  misc_feature (285)..(285): n is a, c, g, or t
  misc_feature (319)..(319): n is a, c, g, or t
  misc_feature (326)..(326): n is a, c, g, or t
  misc_feature (333)..(333): n is a, c, g, or t
  misc_feature (348)..(348): n is a, c, g, or t
  misc_feature (350)..(350): n is a, c, g, or t
  misc_feature (352)..(352): n is a, c, g, or t
  misc_feature (355)..(355): n is a, c, g, or t
  misc_feature (361)..(361): n is a, c, g, or t
  misc_feature (373)..(373): n is a, c, g, or t
  misc_feature (379)..(380): n is a, c, g, or t
  misc_feature (383)..(383): n is a, c, g, or t
  misc_feature (386)..(387): n is a, c, g, or t
  misc_feature (415)..(416): n is a, c, g, or t
  misc_feature (419)..(419): n is a, c, g, or t
  misc_feature (421)..(421): n is a, c, g, or t
  misc_feature (434)..(434): n is a, c, g, or t
  misc_feature (439)..(440): n is a, c, g, or t
  misc_feature (447)..(447): n is a, c, g, or t
  misc_feature (450)..(450): n is a, c, g, or t
  misc_feature (452)..(454): n is a, c, g, or t
  misc_feature (464)..(464): n is a, c, g, or t
  misc_feature (466)..(467): n is a, c, g, or t
  misc_feature (472)..(472): n is a, c, g, or t
  misc_feature (475)..(475): n is a, c, g, or t
  misc_feature (482)..(483): n is a, c, g, or t
  misc_feature (485)..(485): n is a, c, g, or t
  misc_feature (495)..(495): n is a, c, g, or t
  misc_feature (497)..(497): n is a, c, g, or t
  misc_feature (499)..(499): n is a, c, g, or t
  misc_feature (508)..(508): n is a, c, g, or t
  misc_feature (527)..(529): n is a, c, g, or t
  misc_feature (532)..(535): n is a, c, g, or t
  misc_feature (540)..(540): n is a, c, g, or t
  misc_feature (543)..(543): n is a, c, g, or t
  misc_feature (545)..(545): n is a, c, g, or t
  misc_feature (555)..(555): n is a, c, g, or t
  misc_feature (564)..(565): n is a, c, g, or t
  misc_feature (582)..(583): n is a, c, g, or t
  misc_feature (585)..(586): n is a, c, g, or t
  misc_feature (590)..(590): n is a, c, g, or t
  misc_feature (593)..(593): n is a, c, g, or t
  misc_feature (595)..(595): n is a, c, g, or t
  misc_feature (601)..(601): n is a, c, g, or t
  misc_feature (605)..(605): n is a, c, g, or t
  misc_feature (607)..(607): n is a, c, g, or t
  misc_feature (611)..(612): n is a, c, g, or t
  misc_feature (624)..(624): n is a, c, g, or t
  misc_feature (628)..(628): n is a, c, g, or t
  misc_feature (631)..(635): n is a, c, g, or t
  misc_feature (638)..(638): n is a, c, g, or t
  misc_feature (647)..(649): n is a, c, g, or t
  misc_feature (663)..(663): n is a, c, g, or t
  misc_feature (695)..(695): n is a, c, g, or t
  misc_feature (721)..(721): n is a, c, g, or t
  misc_feature (724)..(724): n is a, c, g, or t
  misc_feature (731)..(732): n is a, c, g, or t
  misc_feature (740)..(740): n is a, c, g, or t
  misc_feature (743)..(743): n is a, c, g, or t
  misc_feature (746)..(747): n is a, c, g, or t
  misc_feature (751)..(753): n is a, c, g, or t
  misc_feature (758)..(758): n is a, c, g, or t
  misc_feature (770)..(770): n is a, c, g, or t
  misc_feature (774)..(774): n is a, c, g, or t
  misc_feature (784)..(784): n is a, c, g, or t
  misc_feature (786)..(786): n is a, c, g, or t
  misc_feature (789)..(789): n is a, c, g, or t
  misc_feature (792)..(792): n is a, c, g, or t
  misc_feature (799)..(799): n is a, c, g, or t
  misc_feature (809)..(810): n is a, c, g, or t
  misc_feature (813)..(813): n is a, c, g, or t
  misc_feature (816)..(816): n is a, c, g, or t
  misc_feature (824)..(824): n is a, c, g, or t
  misc_feature (837)..(837): n is a, c, g, or t
  misc_feature (842)..(843): n is a, c, g, or t
  misc_feature (848)..(848): n is a, c, g, or t
  misc_feature (851)..(851): n is a, c, g, or t
  misc_feature (857)..(857): n is a, c, g, or t
  misc_feature (865)..(865): n is a, c, g, or t
  misc_feature (868)..(868): n is a, c, g, or t
  misc_feature (876)..(876): n is a, c, g, or t
  misc_feature (878)..(878): n is a, c, g, or t
  misc_feature (881)..(881): n is a, c, g, or t
  misc_feature (883)..(883): n is a, c, g, or t
  misc_feature (887)..(887): n is a, c, g, or t
  misc_feature (895)..(896): n is a, c, g, or t
  misc_feature (903)..(903): n is a, c, g, or t
  misc_feature (909)..(910): n is a, c, g, or t
  misc_feature (914)..(914): n is a, c, g, or t
  misc_feature (916)..(916): n is a, c, g, or t
  misc_feature (921)..(921): n is a, c, g, or t
  misc_feature (925)..(925): n is a, c, g, or t
  misc_feature (928)..(928): n is a, c, g, or t
  misc_feature (933)..(933): n is a, c, g, or t
  misc_feature (935)..(935): n is a, c, g, or t
  misc_feature (938)..(938): n is a, c, g, or t
  misc_feature (943)..(943): n is a, c, g, or t
  misc_feature (947)..(947): n is a, c, g, or t
  misc_feature (953)..(953): n is a, c, g, or t
  misc_feature (964)..(964): n is a, c, g, or t
  misc_feature (967)..(969): n is a, c, g, or t
  misc_feature (971)..(972): n is a, c, g, or t
  misc_feature (977)..(978): n is a, c, g, or t
  misc_feature (980)..(981): n is a, c, g, or t
  misc_feature (999)..(1000): n is a, c, g, or t
  misc_feature (1002)..(1002): n is a, c, g, or t
  misc_feature (1009)..(1010): n is a, c, g, or t
  misc_feature (1025)..(1025): n is a, c, g, or t
  misc_feature (1043)..(1043): n is a, c, g, or t
  misc_feature (1046)..(1046): n is a, c, g, or t
  misc_feature (1053)..(1053): n is a, c, g, or t
  misc_feature (1055)..(1056): n is a, c, g, or t
  misc_feature (1068)..(1068): n is a, c, g, or t
  misc_feature (1075)..(1075): n is a, c, g, or t
  misc_feature (1077)..(1077): n is a, c, g, or t
  misc_feature (1084)..(1084): n is a, c, g, or t
  misc_feature (1093)..(1093): n is a, c, g, or t
  misc_feature (1098)..(1099): n is a, c, g, or t
  misc_feature (1106)..(1106): n is a, c, g, or t
  misc_feature (1113)..(1113): n is a, c, g, or t
  misc_feature (1116)..(1117): n is a, c, g, or t
  misc_feature (1120)..(1120): n is a, c, g, or t
  misc_feature (1128)..(1128): n is a, c, g, or t
  misc_feature (1138)..(1138): n is a, c, g, or t
  misc_feature (1147)..(1147): n is a, c, g, or t
  misc_feature (1149)..(1149): n is a, c, g, or t
  misc_feature (1160)..(1160): n is a, c, g, or t
  misc_feature (1167)..(1167): n is a, c, g, or t
  misc_feature (1174)..(1175): n is a, c, g, or t
  misc_feature (1178)..(1178): n is a, c, g, or t
  misc_feature (1182)..(1182): n is a, c, g, or t
  misc_feature (1184)..(1185): n is a, c, g, or t
  misc_feature (1190)..(1190): n is a, c, g, or t
  misc_feature (1192)..(1193): n is a, c, g, or t
  misc_feature (1195)..(1195): n is a, c, g, or t
  misc_feature (1204)..(1204): n is a, c, g, or t
  misc_feature (1207)..(1207): n is a, c, g, or t
  misc_feature (1214)..(1214): n is a, c, g, or t
  misc_feature (1218)..(1219): n is a, c, g, or t
  misc_feature (1221)..(1221): n is a, c, g, or t
  misc_feature (1226)..(1226): n is a, c, g, or t
  misc_feature (1233)..(1233): n is a, c, g, or t
  misc_feature (1236)..(1236): n is a, c, g, or t
  misc_feature (1238)..(1238): n is a, c, g, or t
  misc_feature (1243)..(1243): n is a, c, g, or t
  misc_feature (1248)..(1248): n is a, c, g, or t
  misc_feature (1253)..(1254): n is a, c, g, or t
  misc_feature (1259)..(1259): n is a, c, g, or t
  misc_feature (1268)..(1268): n is a, c, g, or t
  misc_feature (1282)..(1283): n is a, c, g, or t
  misc_feature (1287)..(1287): n is a, c, g, or t
  misc_feature (1291)..(1292): n is a, c, g, or t
  misc_feature (1295)..(1295): n is a, c, g, or t
  misc_feature (1297)..(1297): n is a, c, g, or t
  misc_feature (1304)..(1304): n is a, c, g, or t
  misc_feature (1308)..(1311): n is a, c, g, or t
  misc_feature (1315)..(1315): n is a, c, g, or t
  misc_feature (1317)..(1317): n is a, c, g, or t
  misc_feature (1326)..(1326): n is a, c, g, or t
  misc_feature (1332)..(1335): n is a, c, g, or t
  misc_feature (1337)..(1337): n is a, c, g, or t
  misc_feature (1340)..(1348): n is a, c, g, or t
  misc_feature (1352)..(1354): n is a, c, g, or t
  misc_feature (1356)..(1357): n is a, c, g, or t
  misc_feature (1364)..(1365): n is a, c, g, or t
  misc_feature (1368)..(1370): n is a, c, g, or t
  misc_feature (1372)..(1377): n is a, c, g, or t
  misc_feature (1380)..(1383): n is a, c, g, or t
  misc_feature (1385)..(1385): n is a, c, g, or t
  misc_feature (1387)..(1388): n is a, c, g, or t
  misc_feature (1395)..(1395): n is a, c, g, or t
  misc_feature (1398)..(1400): n is a, c, g, or t
  misc_feature (1402)..(1403): n is a, c, g, or t
  misc_feature (1405)..(1409): n is a, c, g, or t
  misc_feature (1411)..(1413): n is a, c, g, or t
  misc_feature (1417)..(1418): n is a, c, g, or t
  misc_feature (1424)..(1425): n is a, c, g, or t
  misc_feature (1429)..(1430): n is a, c, g, or t
  misc_feature (1436)..(1437): n is a, c, g, or t
  misc_feature (1440)..(1440): n is a, c, g, or t
  misc_feature (1443)..(1443): n is a, c, g, or t
  misc_feature (1445)..(1448): n is a, c, g, or t
atagagaaattactatgagaggatcgcatcaccatcaccatcacggatcctatttaggtgacactatagaatcgtcgacccacgcgtccgganacacttggacnnattatggctganttnttggncnataanttgaccagnggagggatctgggtctgtgttacagagatgagnaggtccatgatcatccttggaacggaacnacccnaaatntctcgcctcttcataaacctgatgggtttataaccttaccacagttgggcaactggganaagatgtnactgncatccccttgtccctcccccgtatacctgtaggnagaaagntataacntccctgtctttcccngnanttnatgctnaggacagaaatnaaaatnnagngannctggaatagcactttcgatacccacatnntgngntccgtgaaggccngttcnntgaattnccnannnccttccaccnannacatngcntttgagnncnatggggatcncncncgtggggtntcttatttgaacttggacnnnggnnnntacangcncnccctgacatnctcccagannccttctctctatgtttnntnngtgnggncngaggantcancncctnnaaatactggtcncatngtnnnnnctnctaatttcnnnatgtcccaagtgcncaacatgcacctgctgtctcctgggcctattntgaactgcagatgctgtccacacacngancttgacnntgtgttanacnganntccnnnatgcnactatctcgtantcantgtgtcctcntntgnccngaataanacccgagatnntanttnagcagatnctctactatctcnttgcnnatggnttnctttgngagaaggnctnaaagcctntntanangaanaggctctnngaatgcnccagtnntcananaaaanagangcntttcntnctngatgntccnatttanggggatggctntcnnntnnaacanntnngggagttttactattaannanaatgacnnggaacaatgatttgnaaaacttctttggttccnccntgaaacnannttgaaaaccccncttttananacctggnacaaaaaancattnntgggaancccgggnaannccncttggggnaaaaaaaaanggccctttncngattttatttnggcgatnaaaagtnnggngggnanncccancnntnttttaaacnaanccccaantttnntnggggnaaaaaanggntnaaagnccccnaaatnncgggnccctccctnaaaaccttggattnnaaancctnnctntnccccctnagannnncctntntttggggantttttnnnntnaannnnnnnnnaaannncnnaaaattnnaannnannnnnntgnnnnanannccctctnccnnngnnannnnntnnnaaannattttnntttnnccaaannttnaantnnnn

SEQ ID NO: 439 - DNA, 1428 bp, Homo Sapiens
  misc_feature (474)..(474): n is a, c, g, or t
  misc_feature (492)..(492): n is a, c, g, or t
  misc_feature (514)..(514): n is a, c, g, or t
  misc_feature (551)..(551): n is a, c, g, or t
  misc_feature (603)..(603): n is a, c, g, or t
  misc_feature (797)..(797): n is a, c, g, or t
  misc_feature (801)..(801): n is a, c, g, or t
  misc_feature (819)..(819): n is a, c, g, or t
  misc_feature (868)..(868): n is a, c, g, or t
  misc_feature (870)..(870): n is a, c, g, or t
  misc_feature (874)..(874): n is a, c, g, or t
  misc_feature (892)..(892): n is a, c, g, or t
  misc_feature (908)..(909): n is a, c, g, or t
  misc_feature (923)..(923): n is a, c, g, or t
  misc_feature (928)..(928): n is a, c, g, or t
  misc_feature (942)..(943): n is a, c, g, or t
  misc_feature (950)..(950): n is a, c, g, or t
  misc_feature (952)..(952): n is a, c, g, or t
  misc_feature (965)..(965): n is a, c, g, or t
  misc_feature (967)..(967): n is a, c, g, or t
  misc_feature (969)..(969): n is a, c, g, or t
  misc_feature (971)..(971): n is a, c, g, or t
  misc_feature (975)..(975): n is a, c, g, or t
  misc_feature (989)..(989): n is a, c, g, or t
  misc_feature (994)..(994): n is a, c, g, or t
  misc_feature (997)..(997): n is a, c, g, or t
  misc_feature (1010)..(1010): n is a, c, g, or t
  misc_feature (1041)..(1041): n is a, c, g, or t
  misc_feature (1043)..(1044): n is a, c, g, or t
  misc_feature (1050)..(1050): n is a, c, g, or t
  misc_feature (1052)..(1054): n is a, c, g, or t
  misc_feature (1074)..(1074): n is a, c, g, or t
  misc_feature (1085)..(1085): n is a, c, g, or t
  misc_feature (1090)..(1090): n is a, c, g, or t
  misc_feature (1093)..(1093): n is a, c, g, or t
  misc_feature (1095)..(1095): n is a, c, g, or t
  misc_feature (1112)..(1112): n is a, c, g, or t
  misc_feature (1120)..(1120): n is a, c, g, or t
  misc_feature (1124)..(1124): n is a, c, g, or t
  misc_feature (1130)..(1131): n is a, c, g, or t
  misc_feature (1139)..(1139): n is a, c, g, or t
  misc_feature (1141)..(1142): n is a, c, g, or t
  misc_feature (1150)..(1150): n is a, c, g, or t
  misc_feature (1152)..(1152): n is a, c, g, or t
  misc_feature (1154)..(1154): n is a, c, g, or t
  misc_feature (1160)..(1161): n is a, c, g, or t
  misc_feature (1167)..(1167): n is a, c, g, or t
  misc_feature (1178)..(1178): n is a, c, g, or t
  misc_feature (1180)..(1180): n is a, c, g, or t
  misc_feature (1197)..(1197): n is a, c, g, or t
  misc_feature (1201)..(1201): n is a, c, g, or t
  misc_feature (1212)..(1212): n is a, c, g, or t
  misc_feature (1215)..(1215): n is a, c, g, or t
  misc_feature (1219)..(1219): n is a, c, g, or t
  misc_feature (1221)..(1223): n is a, c, g, or t
  misc_feature (1228)..(1229): n is a, c, g, or t
  misc_feature (1231)..(1233): n is a, c, g, or t
  misc_feature (1239)..(1239): n is a, c, g, or t
  misc_feature (1242)..(1242): n is a, c, g, or t
  misc_feature (1244)..(1245): n is a, c, g, or t
  misc_feature (1249)..(1249): n is a, c, g, or t
  misc_feature (1253)..(1253): n is a, c, g, or t
  misc_feature (1255)..(1258): n is a, c, g, or t
  misc_feature (1260)..(1260): n is a, c, g, or t
  misc_feature (1264)..(1265): n is a, c, g, or t
  misc_feature (1274)..(1274): n is a, c, g, or t
  misc_feature (1281)..(1281): n is a, c, g, or t
  misc_feature (1284)..(1284): n is a, c, g, or t
  misc_feature (1287)..(1287): n is a, c, g, or t
  misc_feature (1290)..(1290): n is a, c, g, or t
  misc_feature (1292)..(1292): n is a, c, g, or t
  misc_feature (1298)..(1298): n is a, c, g, or t
  misc_feature (1301)..(1301): n is a, c, g, or t
  misc_feature (1310)..(1311): n is a, c, g, or t
  misc_feature (1322)..(1324): n is a, c, g, or t
  misc_feature (1326)..(1327): n is a, c, g, or t
  misc_feature (1332)..(1332): n is a, c, g, or t
  misc_feature (1334)..(1334): n is a, c, g, or t
  misc_feature (1342)..(1344): n is a, c, g, or t
  misc_feature (1352)..(1352): n is a, c, g, or t
  misc_feature (1358)..(1359): n is a, c, g, or t
  misc_feature (1372)..(1372): n is a, c, g, or t
  misc_feature (1377)..(1377): n is a, c, g, or t
  misc_feature (1380)..(1381): n is a, c, g, or t
  misc_feature (1384)..(1387): n is a, c, g, or t
  misc_feature (1390)..(1390): n is a, c, g, or t
  misc_feature (1394)..(1394): n is a, c, g, or t
  misc_feature (1397)..(1397): n is a, c, g, or t
  misc_feature (1402)..(1402): n is a, c, g, or t
  misc_feature (1410)..(1410): n is a, c, g, or t
  misc_feature (1413)..(1413): n is a, c, g, or t
  misc_feature (1418)..(1419): n is a, c, g, or t
  misc_feature (1422)..(1423): n is a, c, g, or t
atatagagaaattactatgagaggatcgcatcaccatcaccatcacggatcctatttaggtgacactatagaatcgtcgacccacgcgtccggccaaggcctgctgggcccccgcggacccaggtgctctgggtcacggtccctgtccccgcacccccgcttctgtctgccccattgtggctcctcaggctctctcccctgctctcccacctctacctccacccccaccggcctgacgctgtggccccgggacccagcagagctgggggagggatcagcccccaaagaaatgggggtgcatgctgggcctggccccctggcccacccccactttccagggcaaaaagggcccagggttataataagtaaataacttgtctgtaaaaaaaaaaaaaaaaaaaaaaaaaagggcggccgctccctatagtgagtcgtattaagcttaattagctgagcttggactcctgttgatanatccagtaatgacctcanaactccatctggatttgttcanaacgctcggttgccgccgggcgttttttattggtganaatccaagctagcttggcgagattttcaggagctaaggaagctaaaatgganaaaaaaatcactggatataccaccgttgatatatcccaatggcatcgtaaagaacattttgaggcatttcagtcagttgctcaatgtacctataaccagaccgttcagctggatattacggcctttttaaagaccgtaaagaaaaataagcacaagttttatccggcctttattcacattcttgcccgcctgangaangctcatccggaaatttcntatggcaatgaaaaaacggtgagctgggtgatatgggaaaagtgttcancnttgnttaaaccgttttttccangaaacaaactgaaaannttttctatcgcctntggantgaaaaaccacgannaattccngnaatttttttaaananananttcncaaaaagggggcgngttanggngaaaaaacttggncctattttcctaaaagggtttaattgaaaananntttttncnnncaaccaaatccccggggggnaatttcccaanttttnaantnaaagggggccaaaaagnaaaatttntttncccccnnttttcccnannggaaaaanananccaagnnaaaaanggtttaatccncngggaaataaaggttatnagcnctttggaaagnttncaancnnnaaaanntnnnaaatanaanannattnaaangnnnngngggnnattttttangaaattnggnctnaancnggaaanatnttcttaggnnaaaaaaaaaannntnnaaaangncttttttnnnttgtttgnaaactnnaaaaaaaaacctnaaatnctnnttnnnnaanaaantanatatntttaaaantanttatnnatnnaaaaa

SEQ ID NO: 440 - DNA, 1402 bp, Homo Sapiens
  misc_feature (4)..(5): n is a, c, g, or t
  misc_feature (7)..(7): n is a, c, g, or t
  misc_feature (11)..(11): n is a, c, g, or t
  misc_feature (75)..(77): n is a, c, g, or t
  misc_feature (82)..(82): n is a, c, g, or t
  misc_feature (115)..(115): n is a, c, g, or t
  misc_feature (118)..(118): n is a, c, g, or t
  misc_feature (121)..(123): n is a, c, g, or t
  misc_feature (190)..(190): n is a, c, g, or t
  misc_feature (207)..(207): n is a, c, g, or t
  misc_feature (210)..(210): n is a, c, g, or t
  misc_feature (231)..(231): n is a, c, g, or t
  misc_feature (271)..(271): n is a, c, g, or t
  misc_feature (277)..(277): n is a, c, g, or t
  misc_feature (292)..(292): n is a, c, g, or t
  misc_feature (303)..(303): n is a, c, g, or t
  misc_feature (312)..(312): n is a, c, g, or t
  misc_feature (320)..(320): n is a, c, g, or t
  misc_feature (336)..(336): n is a, c, g, or t
  misc_feature (344)..(344): n is a, c, g, or t
  misc_feature (355)..(355): n is a, c, g, or t
  misc_feature (358)..(359): n is a, c, g, or t
  misc_feature (364)..(364): n is a, c, g, or t
  misc_feature (367)..(367): n is a, c, g, or t
  misc_feature (370)..(370): n is a, c, g, or t
  misc_feature (379)..(379): n is a, c, g, or t
  misc_feature (381)..(382): n is a, c, g, or t
  misc_feature (389)..(389): n is a, c, g, or t
  misc_feature (395)..(395): n is a, c, g, or t
  misc_feature (398)..(398): n is a, c, g, or t
  misc_feature (407)..(407): n is a, c, g, or t
  misc_feature (428)..(428): n is a, c, g, or t
  misc_feature (448)..(448): n is a, c, g, or t
  misc_feature (450)..(450): n is a, c, g, or t
  misc_feature (460)..(463): n is a, c, g, or t
  misc_feature (470)..(470): n is a, c, g, or t
  misc_feature (474)..(474): n is a, c, g, or t
  misc_feature (480)..(480): n is a, c, g, or t
  misc_feature (485)..(486): n is a, c, g, or t
  misc_feature (491)..(491): n is a, c, g, or t
  misc_feature (493)..(493): n is a, c, g, or t
  misc_feature (498)..(500): n is a, c, g, or t
  misc_feature (506)..(506): n is a, c, g, or t
  misc_feature (515)..(515): n is a, c, g, or t
  misc_feature (522)..(522): n is a, c, g, or t
  misc_feature (526)..(527): n is a, c, g, or t
  misc_feature (532)..(533): n is a, c, g, or t
  misc_feature (539)..(539): n is a, c, g, or t
  misc_feature (542)..(542): n is a, c, g, or t
  misc_feature (548)..(548): n is a, c, g, or t
  misc_feature (550)..(550): n is a, c, g, or t
  misc_feature (562)..(562): n is a, c, g, or t
  misc_feature (565)..(565): n is a, c, g, or t
  misc_feature (570)..(570): n is a, c, g, or t
  misc_feature (574)..(575): n is a, c, g, or t
  misc_feature (580)..(580): n is a, c, g, or t
  misc_feature (583)..(583): n is a, c, g, or t
  misc_feature (591)..(591): n is a, c, g, or t
  misc_feature (598)..(598): n is a, c, g, or t
  misc_feature (600)..(600): n is a, c, g, or t
  misc_feature (602)..(602): n is a, c, g, or t
  misc_feature (610)..(611): n is a, c, g, or t
  misc_feature (621)..(621): n is a, c, g, or t
  misc_feature (626)..(626): n is a, c, g, or t
  misc_feature (638)..(638): n is a, c, g, or t
  misc_feature (646)..(646): n is a, c, g, or t
  misc_feature (651)..(652): n is a, c, g, or t
  misc_feature (654)..(654): n is a, c, g, or t
  misc_feature (665)..(665): n is a, c, g, or t
  misc_feature (668)..(668): n is a, c, g, or t
  misc_feature (676)..(676): n is a, c, g, or t
  misc_feature (681)..(681): n is a, c, g, or t
  misc_feature (686)..(686): n is a, c, g, or t
  misc_feature (690)..(690): n is a, c, g, or t
  misc_feature (693)..(693): n is a, c, g, or t
  misc_feature (695)..(695): n is a, c, g, or t
  misc_feature (697)..(698): n is a, c, g, or t
  misc_feature (701)..(701): n is a, c, g, or t
  misc_feature (711)..(711): n is a, c, g, or t
  misc_feature (717)..(717): n is a, c, g, or t
  misc_feature (720)..(720): n is a, c, g, or t
  misc_feature (722)..(722): n is a, c, g, or t
  misc_feature (725)..(725): n is a, c, g, or t
  misc_feature (727)..(727): n is a, c, g, or t
  misc_feature (733)..(733): n is a, c, g, or t
  misc_feature (745)..(745): n is a, c, g, or t
  misc_feature (748)..(748): n is a, c, g, or t
  misc_feature (751)..(751): n is a, c, g, or t
  misc_feature (753)..(753): n is a, c, g, or t
  misc_feature (755)..(755): n is a, c, g, or t
  misc_feature (761)..(761): n is a, c, g, or t
  misc_feature (765)..(766): n is a, c, g, or t
  misc_feature (772)..(774): n is a, c, g, or t
  misc_feature (779)..(779): n is a, c, g, or t
  misc_feature (781)..(781): n is a, c, g, or t
  misc_feature (784)..(784): n is a, c, g, or t
  misc_feature (786)..(789): n is a, c, g, or t
  misc_feature (794)..(794): n is a, c, g, or t
  misc_feature (796)..(796): n is a, c, g, or t
  misc_feature (799)..(799): n is a, c, g, or t
  misc_feature (804)..(804): n is a, c, g, or t
  misc_feature (806)..(806): n is a, c, g, or t
  misc_feature (810)..(811): n is a, c, g, or t
  misc_feature (819)..(821): n is a, c, g, or t
  misc_feature (824)..(824): n is a, c, g, or t
  misc_feature (826)..(828): n is a, c, g, or t
  misc_feature (830)..(831): n is a, c, g, or t
  misc_feature (839)..(841): n is a, c, g, or t
  misc_feature (843)..(843): n is a, c, g, or t
  misc_feature (848)..(848): n is a, c, g, or t
  misc_feature (850)..(851): n is a, c, g, or t
  misc_feature (858)..(859): n is a, c, g, or t
  misc_feature (861)..(861): n is a, c, g, or t
  misc_feature (864)..(865): n is a, c, g, or t
  misc_feature (872)..(874): n is a, c, g, or t
  misc_feature (880)..(880): n is a, c, g, or t
  misc_feature (884)..(884): n is a, c, g, or t
  misc_feature (888)..(889): n is a, c, g, or t
  misc_feature (891)..(891): n is a, c, g, or t
  misc_feature (894)..(895): n is a, c, g, or t
  misc_feature (900)..(900): n is a, c, g, or t
  misc_feature (923)..(923): n is a, c, g, or t
  misc_feature (927)..(927): n is a, c, g, or t
  misc_feature (933)..(933): n is a, c, g, or t
  misc_feature (935)..(935): n is a, c, g, or t
  misc_feature (939)..(941): n is a, c, g, or t
  misc_feature (943)..(944): n is a, c, g, or t
  misc_feature (946)..(946): n is a, c, g, or t
  misc_feature (954)..(955): n is a, c, g, or t
  misc_feature (958)..(959): n is a, c, g, or t
  misc_feature (961)..(961): n is a, c, g, or t
  misc_feature (967)..(967): n is a, c, g, or t
  misc_feature (969)..(969): n is a, c, g, or t
  misc_feature (971)..(974): n is a, c, g, or t
  misc_feature (977)..(978): n is a, c, g, or t
  misc_feature (981)..(981): n is a, c, g, or t
  misc_feature (985)..(987): n is a, c, g, or t
  misc_feature (991)..(992): n is a, c, g, or t
  misc_feature (995)..(998): n is a, c, g, or t
  misc_feature (1003)..(1003): n is a, c, g, or t
  misc_feature (1005)..(1006): n is a, c, g, or t
  misc_feature (1008)..(1008): n is a, c, g, or t
  misc_feature (1010)..(1011): n is a, c, g, or t
  misc_feature (1013)..(1013): n is a, c, g, or t
  misc_feature (1015)..(1016): n is a, c, g, or t
  misc_feature (1018)..(1018): n is a, c, g, or t
  misc_feature (1023)..(1023): n is a, c, g, or t
  misc_feature (1026)..(1027): n is a, c, g, or t
  misc_feature (1031)..(1032): n is a, c, g, or t
  misc_feature (1034)..(1038): n is a, c, g, or t
  misc_feature (1041)..(1042): n is a, c, g, or t
  misc_feature (1047)..(1047): n is a, c, g, or t
  misc_feature (1051)..(1051): n is a, c, g, or t
  misc_feature (1053)..(1053): n is a, c, g, or t
  misc_feature (1057)..(1057): n is a, c, g, or t
  misc_feature (1062)..(1062): n is a, c, g, or t
  misc_feature (1065)..(1065): n is a, c, g, or t
  misc_feature (1067)..(1067): n is a, c, g, or t
  misc_feature (1070)..(1070): n is a, c, g, or t
  misc_feature (1074)..(1074): n is a, c, g, or t
  misc_feature (1076)..(1076): n is a, c, g, or t
  misc_feature (1078)..(1078): n is a, c, g, or t
  misc_feature (1082)..(1084): n is a, c, g, or t
  misc_feature (1087)..(1089): n is a, c, g, or t
  misc_feature (1092)..(1093): n is a, c, g, or t
  misc_feature (1095)..(1095): n is a, c, g, or t
  misc_feature (1098)..(1100): n is a, c, g, or t
  misc_feature (1105)..(1107): n is a, c, g, or t
  misc_feature (1110)..(1110): n is a, c, g, or t
  misc_feature (1115)..(1115): n is a, c, g, or t
  misc_feature (1121)..(1121): n is a, c, g, or t
  misc_feature (1128)..(1128): n is a, c, g, or t
  misc_feature (1130)..(1130): n is a, c, g, or t
  misc_feature (1134)..(1134): n is a, c, g, or t
  misc_feature (1140)..(1140): n is a, c, g, or t
  misc_feature (1143)..(1143): n is a, c, g, or t
  misc_feature (1150)..(1150): n is a, c, g, or t
  misc_feature (1158)..(1158): n is a, c, g, or t
  misc_feature (1161)..(1163): n is a, c, g, or t
  misc_feature (1165)..(1165): n is a, c, g, or t
  misc_feature (1170)..(1170): n is a, c, g, or t
  misc_feature (1176)..(1176): n is a, c, g, or t
  misc_feature (1178)..(1180): n is a, c, g, or t
  misc_feature (1182)..(1182): n is a, c, g, or t
  misc_feature (1185)..(1190): n is a, c, g, or t
  misc_feature (1192)..(1192): n is a, c, g, or t
  misc_feature (1197)..(1197): n is a, c, g, or t
  misc_feature (1199)..(1199): n is a, c, g, or t
  misc_feature (1201)..(1201): n is a, c, g, or t
  misc_feature (1204)..(1205): n is a, c, g, or t
  misc_feature (1207)..(1207): n is a, c, g, or t
  misc_feature (1209)..(1211): n is a, c, g, or t
  misc_feature (1214)..(1216): n is a, c, g, or t
  misc_feature (1219)..(1219): n is a, c, g, or t
  misc_feature (1224)..(1226): n is a, c, g, or t
  misc_feature (1231)..(1231): n is a, c, g, or t
  misc_feature (1233)..(1233): n is a, c, g, or t
  misc_feature (1236)..(1236): n is a, c, g, or t
  misc_feature (1238)..(1238): n is a, c, g, or t
  misc_feature (1249)..(1249): n is a, c, g, or t
  misc_feature (1256)..(1256): n is a, c, g, or t
  misc_feature (1258)..(1260): n is a, c, g, or t
  misc_feature (1262)..(1263): n is a, c, g, or t
  misc_feature (1266)..(1267): n is a, c, g, or t
  misc_feature (1269)..(1270): n is a, c, g, or t
  misc_feature (1272)..(1272): n is a, c, g, or t
  misc_feature (1274)..(1275): n is a, c, g, or t
  misc_feature (1278)..(1278): n is a, c, g, or t
  misc_feature (1281)..(1281): n is a, c, g, or t
  misc_feature (1285)..(1285): n is a, c, g, or t
  misc_feature (1287)..(1287): n is a, c, g, or t
  misc_feature (1289)..(1289): n is a, c, g, or t
  misc_feature (1291)..(1291): n is a, c, g, or t
  misc_feature (1295)..(1295): n is a, c, g, or t
  misc_feature (1298)..(1298): n is a, c, g, or t
  misc_feature (1300)..(1304): n is a, c, g, or t
  misc_feature (1306)..(1306): n is a, c, g, or t
  misc_feature (1310)..(1311): n is a, c, g, or t
  misc_feature (1313)..(1314): n is a, c, g, or t
  misc_feature (1317)..(1317): n is a, c, g, or t
  misc_feature (1322)..(1322): n is a, c, g, or t
  misc_feature (1325)..(1327): n is a, c, g, or t
  misc_feature (1331)..(1332): n is a, c, g, or t
  misc_feature (1337)..(1337): n is a, c, g, or t
  misc_feature (1339)..(1339): n is a, c, g, or t
  misc_feature (1344)..(1344): n is a, c, g, or t
  misc_feature (1346)..(1348): n is a, c, g, or t
  misc_feature (1350)..(1352): n is a, c, g, or t
  misc_feature (1355)..(1355): n is a, c, g, or t
  misc_feature (1359)..(1360): n is a, c, g, or t
  misc_feature (1362)..(1362): n is a, c, g, or t
  misc_feature (1368)..(1370): n is a, c, g, or t
  misc_feature (1372)..(1372): n is a, c, g, or t
  misc_feature (1374)..(1375): n is a, c, g, or t
  misc_feature (1377)..(1377): n is a, c, g, or t
  misc_feature (1384)..(1385): n is a, c, g, or t
  misc_feature (1387)..(1387): n is a, c, g, or t
  misc_feature (1389)..(1390): n is a, c, g, or t
  misc_feature (1395)..(1398): n is a, c, g, or t
aggnnanaagngagaatactatgagaggatcgcatcaccatcaccatcacgggatcctatttaggtgacaccatnnnaaacnctcgacccacgcgtccgcccacgcgtccgcccnctnaannnccgctgccgtccgcatgctcccgacgcggagcccggagcccgcgccgagcccctggcctcgcggtgncatgctgccccggcggnggngctgaaggatggcgacgccgntgcgtccgccctcccggcggtgccagcggctgctgcggcngctgcnctccggactcggccncggcgccgccntgcgtgganccgccgcnggacacccggaggtangcgcccgncccgggagccnggnntgtgnccngangaggcgggnanngtgaccncctggngcncatgccggngagggcctgctgttcagcccntaaggaggaccagcacgggntntggggggggnnnnaaacacncgcntgccangaggnngacangncccgnnngaactnggaagaggntactganctcnnggacnngggacntgncgaggnanggactccggagngtncaccntccnncccgnacncaaagganccaacgntngncctcccgnnaggccgccancccgngagtctgagcangggagacnggggnnanggaatctgggncgnggccgccngaacnggagnaaantangncnnaanagccaaaaanagcctnagntntgncnctgggntgaaaccggaancgngcngnancagggngggnngacatnnnacccngnggngnnnntttanangcnagacngnaaanngtcccacnnnacngnnncnntgccgctnnncnatggncnnaaagagnnangcnncccgagnnnaaaccnggcntganncnggnnggggngccccaaccccaccaatgcgggngganaaaagncnccgnnnanncnaccacggnnccnncngggcgngnannnnacnngtngggnnncacnngannnnccgcngnngnanntncnngntaaangcnnggtnntnnnnngcnngacgnttantncctnggggnganangancccnancntagnnnggnnnagnntnttnnngggannnganaggcncctagncgggggnanctcncccccnggnggagcgnctcgacgnggnnngnccccncagggntnnngncannnnnntnccaangncnctnntncnnncgnnncgngggannncacancnaancnctaaccggagncccattnannngnncanncnncnannaanagngganancnanggcncancnnnnnangcanntnnccngcgtnatnnncgcnngcaancncagtncnnngnnnaangggnnancgggannnangnngngcacagnntntnnctcannnntgcg

SEQ ID NO: 441 - DNA, 1305 bp, Homo Sapiens
  misc_feature (3)..(3): n is a, c, g, or t
  misc_feature (5)..(6): n is a, c, g, or t
  misc_feature (8)..(8): n is a, c, g, or t
  misc_feature (15)..(15): n is a, c, g, or t
  misc_feature (520)..(520): n is a, c, g, or t
  misc_feature (579)..(579): n is a, c, g, or t
  misc_feature (605)..(605): n is a, c, g, or t
  misc_feature (635)..(635): n is a, c, g, or t
  misc_feature (648)..(649): n is a, c, g, or t
  misc_feature (662)..(662): n is a, c, g, or t
  misc_feature (681)..(682): n is a, c, g, or t
  misc_feature (697)..(697): n is a, c, g, or t
  misc_feature (701)..(701): n is a, c, g, or t
  misc_feature (708)..(708): n is a, c, g, or t
  misc_feature (710)..(710): n is a, c, g, or t
  misc_feature (719)..(719): n is a, c, g, or t
  misc_feature (723)..(723): n is a, c, g, or t
  misc_feature (733)..(733): n is a, c, g, or t
  misc_feature (742)..(742): n is a, c, g, or t
  misc_feature (749)..(749): n is a, c, g, or t
  misc_feature (752)..(752): n is a, c, g, or t
  misc_feature (755)..(755): n is a, c, g, or t
  misc_feature (761)..(762): n is a, c, g, or t
  misc_feature (770)..(770): n is a, c, g, or t
  misc_feature (783)..(783): n is a, c, g, or t
  misc_feature (786)..(786): n is a, c, g, or t
  misc_feature (790)..(790): n is a, c, g, or t
  misc_feature (799)..(799): n is a, c, g, or t
  misc_feature (802)..(802): n is a, c, g, or t
  misc_feature (806)..(806): n is a, c, g, or t
  misc_feature (812)..(812): n is a, c, g, or t
  misc_feature (814)..(814): n is a, c, g, or t
  misc_feature (819)..(821): n is a, c, g, or t
  misc_feature (823)..(825): n is a, c, g, or t
  misc_feature (833)..(834): n is a, c, g, or t
  misc_feature (840)..(840): n is a, c, g, or t
  misc_feature (842)..(842): n is a, c, g, or t
  misc_feature (845)..(846): n is a, c, g, or t
  misc_feature (850)..(850): n is a, c, g, or t
  misc_feature (854)..(854): n is a, c, g, or t
  misc_feature (857)..(857): n is a, c, g, or t
  misc_feature (859)..(859): n is a, c, g, or t
  misc_feature (863)..(863): n is a, c, g, or t
  misc_feature (866)..(866): n is a, c, g, or t
  misc_feature (869)..(871): n is a, c, g, or t
  misc_feature (874)..(874): n is a, c, g, or t
  misc_feature (883)..(883): n is a, c, g, or t
  misc_feature (885)..(885): n is a, c, g, or t
  misc_feature (887)..(887): n is a, c, g, or t
  misc_feature (889)..(889): n is a, c, g, or t
  misc_feature (892)..(892): n is a, c, g, or t
  misc_feature (895)..(895): n is a, c, g, or t
  misc_feature (897)..(898): n is a, c, g, or t
  misc_feature (907)..(909): n is a, c, g, or t
  misc_feature (912)..(915): n is a, c, g, or t
  misc_feature (917)..(917): n is a, c, g, or t
  misc_feature (920)..(920): n is a, c, g, or t
  misc_feature (922)..(923): n is a, c, g, or t
  misc_feature (925)..(926): n is a, c, g, or t
  misc_feature (944)..(945): n is a, c, g, or t
  misc_feature (947)..(947): n is a, c, g, or t
  misc_feature (949)..(950): n is a, c, g, or t
  misc_feature (955)..(956): n is a, c, g, or t
  misc_feature (958)..(962): n is a, c, g, or t
  misc_feature (966)..(968): n is a, c, g, or t
  misc_feature (973)..(973): n is a, c, g, or t
  misc_feature (975)..(977): n is a, c, g, or t
  misc_feature (981)..(981): n is a, c, g, or t
  misc_feature (983)..(983): n is a, c, g, or t
  misc_feature (986)..(988): n is a, c, g, or t
  misc_feature (990)..(991): n is a, c, g, or t
  misc_feature (993)..(994): n is a, c, g, or t
  misc_feature (996)..(998): n is a, c, g, or t
  misc_feature (1000)..(1002): n is a, c, g, or t
  misc_feature (1006)..(1006): n is a, c, g, or t
  misc_feature (1009)..(1012): n is a, c, g, or t
  misc_feature (1014)..(1014): n is a, c, g, or t
  misc_feature (1020)..(1026): n is a, c, g, or t
  misc_feature (1028)..(1029): n is a, c, g, or t
  misc_feature (1031)..(1031): n is a, c, g, or t
  misc_feature (1034)..(1036): n is a, c, g, or t
  misc_feature (1039)..(1040): n is a, c, g, or t
  misc_feature (1042)..(1043): n is a, c, g, or t
  misc_feature (1046)..(1046): n is a, c, g, or t
  misc_feature (1050)..(1050): n is a, c, g, or t
  misc_feature (1053)..(1057): n is a, c, g, or t
  misc_feature (1059)..(1059): n is a, c, g, or t
  misc_feature (1062)..(1062): n is a, c, g, or t
  misc_feature (1068)..(1069): n is a, c, g, or t
  misc_feature (1071)..(1072): n is a, c, g, or t
  misc_feature (1074)..(1078): n is a, c, g, or t
  misc_feature (1081)..(1082): n is a, c, g, or t
  misc_feature (1085)..(1085): n is a, c, g, or t
  misc_feature (1091)..(1091): n is a, c, g, or t
  misc_feature (1093)..(1093): n is a, c, g, or t
  misc_feature (1096)..(1096): n is a, c, g, or t
  misc_feature (1098)..(1098): n is a, c, g, or t
  misc_feature (1100)..(1100): n is a, c, g, or t
  misc_feature (1103)..(1104): n is a, c, g, or t
  misc_feature (1106)..(1108): n is a, c, g, or t
  misc_feature (1110)..(1110): n is a, c, g, or t
  misc_feature (1113)..(1113): n is a, c, g, or t
  misc_feature (1115)..(1116): n is a, c, g, or t
  misc_feature (1118)..(1118): n is a, c, g, or t
  misc_feature (1120)..(1121): n is a, c, g, or t
  misc_feature (1124)..(1124): n is a, c, g, or t
  misc_feature (1130)..(1131): n is a, c, g, or t
  misc_feature (1134)..(1137): n is a, c, g, or t
  misc_feature (1139)..(1140): n is a, c, g, or t
  misc_feature (1142)..(1143): n is a, c, g, or t
  misc_feature (1145)..(1145): n is a, c, g, or t
  misc_feature (1148)..(1148): n is a, c, g, or t
  misc_feature (1151)..(1151): n is a, c, g, or t
  misc_feature (1153)..(1153): n is a, c, g, or t
  misc_feature (1159)..(1163): n is a, c, g, or t
  misc_feature (1165)..(1166): n is a, c, g, or t
  misc_feature (1168)..(1168): n is a, c, g, or t
  misc_feature (1170)..(1177): n is a, c, g, or t
  misc_feature (1179)..(1179): n is a, c, g, or t
  misc_feature (1182)..(1185): n is a, c, g, or t
  misc_feature (1188)..(1189): n is a, c, g, or t
  misc_feature (1191)..(1192): n is a, c, g, or t
  misc_feature (1194)..(1195): n is a, c, g, or t
  misc_feature (1197)..(1199): n is a, c, g, or t
  misc_feature (1203)..(1205): n is a, c, g, or t
  misc_feature (1207)..(1208): n is a, c, g, or t
  misc_feature (1210)..(1212): n is a, c, g, or t
  misc_feature (1214)..(1214): n is a, c, g, or t
  misc_feature (1216)..(1218): n is a, c, g, or t
  misc_feature (1220)..(1220): n is a, c, g, or t
  misc_feature (1225)..(1226): n is a, c, g, or t
  misc_feature (1228)..(1228): n is a, c, g, or t
  misc_feature (1230)..(1230): n is a, c, g, or t
  misc_feature (1232)..(1233): n is a, c, g, or t
  misc_feature (1236)..(1236): n is a, c, g, or t
  misc_feature (1239)..(1239): n is a, c, g, or t
  misc_feature (1241)..(1241): n is a, c, g, or t
  misc_feature (1243)..(1244): n is a, c, g, or t
  misc_feature (1246)..(1249): n is a, c, g, or t
  misc_feature (1251)..(1258): n is a, c, g, or t
  misc_feature (1260)..(1260): n is a, c, g, or t
  misc_feature (1262)..(1262): n is a, c, g, or t
  misc_feature (1264)..(1265): n is a, c, g, or t
  misc_feature (1270)..(1273): n is a, c, g, or t
  misc_feature (1275)..(1277): n is a, c, g, or t
  misc_feature (1279)..(1279): n is a, c, g, or t
  misc_feature (1282)..(1282): n is a, c, g, or t
  misc_feature (1284)..(1284): n is a, c, g, or t
  misc_feature (1286)..(1288): n is a, c, g, or t
  misc_feature (1290)..(1290): n is a, c, g, or t
  misc_feature (1293)..(1294): n is a, c, g, or t
  misc_feature (1296)..(1296): n is a, c, g, or t
  misc_feature (1298)..(1305): n is a, c, g, or t
atnannangaaaatnactatgagaggatcgcatcaccatcaccatcacggatcctatttaggtgacactatagaatcgtcgacccacgcgtccgaaaggcgcggcggggaggggagccggggccccagccctgccgggaaacgggttcccagtcccggccgagagcgcgggcgccgaggggaccgacccggactccccgcaaccccccaaccgccaggccatggcgcccacggggctcctggtggccggcgcctccttcctcgcgttccgggggctgcactgggggttgcggcggctgcccacgccggaatcggccgctcgggaccgctggcagtggtggaacctctgcgtctccctggcgcacagcctgctctcggggaccggggcgctgctcggcctgtcactgtaccctcagatggccgccgaccccatccatggccacccgcgctgggctctggtgctggtggctgtgtctgtgggttacttcctggcagacggagctgacctgctgtggaaccanaccttgggcaagacctgggatcttctctgtcatcatttggtggtggtgagctgcctcancaccgctgttctgtctggccactacntgggcttctccatggtgtctctgctcctgnaactgaactccannctgggcaacaaantgagactcttgtctctaannaaaaaaaaaaaaaangaanaactggnanttttctganatanattcataaantcttcttcntccctgntgnttntgctgnntttttttntgttgaaaaaaanccnttcnttccaaaanatntaanttaatngnaaatnnncnnnaaaattanntttgantnttnnattnaaantgnanttanaanaannnaanttttttatntntntnaanaanannttttttttnnnaannnnanaananntnnaaattttttttttaaaannanannttttnnannnnnatannnttttntnnntaantnaannntnntnntnnntnnntaanaannnnanaaatannnnnnntnntnttnnnttnnannttnaaantannnnnantantttttnntnntnnnnntannaantttttnanaantntnatnntnnnanaananntntnntanttaaannatnnnnannanntnttnatnanttattnnnnnannanannnnnnnnanatnnnnatnnanntnntnnnaaannntnntnnnantnnntntatanntntntnnttnatnantnntnnnntnnnnnnnnananannataannnntnnntntanantnnntnatnntntnnnnnnnn

SEQ ID NO: 442 - DNA, 1326 bp, Homo Sapiens
  misc_feature (134)..(134): n is a, c, g, or t
  misc_feature (162)..(162): n is a, c, g, or t
  misc_feature (185)..(185): n is a, c, g, or t
  misc_feature (193)..(194): n is a, c, g, or t
  misc_feature (198)..(198): n is a, c, g, or t
  misc_feature (201)..(201): n is a, c, g, or t
  misc_feature (210)..(210): n is a, c, g, or t
  misc_feature (223)..(223): n is a, c, g, or t
  misc_feature (254)..(254): n is a, c, g, or t
  misc_feature (256)..(256): n is a, c, g, or t
  misc_feature (282)..(282): n is a, c, g, or t
  misc_feature (284)..(284): n is a, c, g, or t
  misc_feature (291)..(291): n is a, c, g, or t
  misc_feature (293)..(293): n is a, c, g, or t
  misc_feature (305)..(305): n is a, c, g, or t
  misc_feature (308)..(308): n is a, c, g, or t
  misc_feature (315)..(315): n is a, c, g, or t
  misc_feature (346)..(346): n is a, c, g, or t
  misc_feature (368)..(368): n is a, c, g, or t
  misc_feature (387)..(387): n is a, c, g, or t
  misc_feature (416)..(416): n is a, c, g, or t
  misc_feature (442)..(442): n is a, c, g, or t
  misc_feature (457)..(457): n is a, c, g, or t
  misc_feature (492)..(492): n is a, c, g, or t
  misc_feature (548)..(548): n is a, c, g, or t
  misc_feature (579)..(579): n is a, c, g, or t
  misc_feature (582)..(582): n is a, c, g, or t
  misc_feature (591)..(591): n is a, c, g, or t
  misc_feature (634)..(634): n is a, c, g, or t
  misc_feature (654)..(654): n is a, c, g, or t
  misc_feature (766)..(766): n is a, c, g, or t
  misc_feature (814)..(814): n is a, c, g, or t
  misc_feature (820)..(820): n is a, c, g, or t
  misc_feature (838)..(838): n is a, c, g, or t
  misc_feature (846)..(846): n is a, c, g, or t
  misc_feature (862)..(862): n is a, c, g, or t
  misc_feature (866)..(866): n is a, c, g, or t
  misc_feature (875)..(875): n is a, c, g, or t
  misc_feature (884)..(884): n is a, c, g, or t
  misc_feature (889)..(889): n is a, c, g, or t
  misc_feature (892)..(892): n is a, c, g, or t
  misc_feature (907)..(907): n is a, c, g, or t
  misc_feature (909)..(909): n is a, c, g, or t
  misc_feature (916)..(916): n is a, c, g, or t
  misc_feature (919)..(919): n is a, c, g, or t
  misc_feature (930)..(930): n is a, c, g, or t
  misc_feature (939)..(939): n is a, c, g, or t
  misc_feature (946)..(946): n is a, c, g, or t
  misc_feature (951)..(951): n is a, c, g, or t
  misc_feature (962)..(962): n is a, c, g, or t
  misc_feature (976)..(976): n is a, c, g, or t
  misc_feature (985)..(985): n is a, c, g, or t
  misc_feature (987)..(987): n is a, c, g, or t
  misc_feature (990)..(990): n is a, c, g, or t
  misc_feature (1013)..(1013): n is a, c, g, or t
  misc_feature (1015)..(1015): n is a, c, g, or t
  misc_feature (1017)..(1017): n is a, c, g, or t
  misc_feature (1025)..(1025): n is a, c, g, or t
  misc_feature (1028)..(1029): n is a, c, g, or t
  misc_feature (1037)..(1037): n is a, c, g, or t
  misc_feature (1042)..(1042): n is a, c, g, or t
  misc_feature (1044)..(1044): n is a, c, g, or t
  misc_feature (1051)..(1051): n is a, c, g, or t
  misc_feature (1058)..(1058): n is a, c, g, or t
  misc_feature (1078)..(1078): n is a, c, g, or t
  misc_feature (1083)..(1083): n is a, c, g, or t
  misc_feature (1085)..(1085): n is a, c, g, or t
  misc_feature (1091)..(1091): n is a, c, g, or t
  misc_feature (1094)..(1094): n is a, c, g, or t
  misc_feature (1107)..(1107): n is a, c, g, or t
  misc_feature (1111)..(1111): n is a, c, g, or t
  misc_feature (1130)..(1130): n is a, c, g, or t
  misc_feature (1132)..(1132): n is a, c, g, or t
  misc_feature (1136)..(1136): n is a, c, g, or t
  misc_feature (1143)..(1143): n is a, c, g, or t
  misc_feature (1148)..(1148): n is a, c, g, or t
  misc_feature (1155)..(1156): n is a, c, g, or t
  misc_feature (1158)..(1158): n is a, c, g, or t
  misc_feature (1162)..(1164): n is a, c, g, or t
  misc_feature (1168)..(1168): n is a, c, g, or t
  misc_feature (1170)..(1170): n is a, c, g, or t
  misc_feature (1177)..(1177): n is a, c, g, or t
  misc_feature (1182)..(1182): n is a, c, g, or t
  misc_feature (1186)..(1186): n is a, c, g, or t
  misc_feature (1190)..(1190): n is a, c, g, or t
  misc_feature (1192)..(1192): n is a, c, g, or t
  misc_feature (1197)..(1199): n is a, c, g, or t
  misc_feature (1203)..(1203): n is a, c, g, or t
  misc_feature (1207)..(1207): n is a, c, g, or t
  misc_feature (1212)..(1212): n is a, c, g, or t
  misc_feature (1215)..(1215): n is a, c, g, or t
  misc_feature (1220)..(1220): n is a, c, g, or t
  misc_feature (1222)..(1222): n is a, c, g, or t
  misc_feature (1225)..(1226): n is a, c, g, or t
  misc_feature (1228)..(1229): n is a, c, g, or t
  misc_feature (1232)..(1237): n is a, c, g, or t
  misc_feature (1240)..(1240): n is a, c, g, or t
  misc_feature (1245)..(1245): n is a, c, g, or t
  misc_feature (1248)..(1248): n is a, c, g, or t
  misc_feature (1252)..(1252): n is a, c, g, or t
  misc_feature (1256)..(1256): n is a, c, g, or t
  misc_feature (1259)..(1261): n is a, c, g, or t
  misc_feature (1263)..(1263): n is a, c, g, or t
  misc_feature (1267)..(1268): n is a, c, g, or t
  misc_feature (1271)..(1271): n is a, c, g, or t
  misc_feature (1276)..(1285): n is a, c, g, or t
  misc_feature (1287)..(1292): n is a, c, g, or t
  misc_feature (1294)..(1295): n is a, c, g, or t
  misc_feature (1299)..(1326): n is a, c, g, or t
tagagaaattactatgagaggatcgcatcaccatcaccatcacggatcctatttaggtgacactatagaatcgtcgacccacgcgtccggcaaacgtgttgctcttaccatcgccttgttccacgatagctggnaaggtcttcattcacttgccactgctantcttccaacccttctggactttntttgctcnngtcntgnttggggtgnactggatcatganacttctttttcttggcactaccggcagtccngntcagaatgagcaaggctttgtggagntnaaaattncngggcctctgcantanatgtggnggtaccatgtggtgggcctgatttggatcantgaatttattctagcatgtcancagatgacagtggcagganctgtggtaacatactattttactaggganaaaaggaatttgccatttacacctantttggcatcagatanatcgccttattcgttaccacctaggtacggtggcnaaaggatctttcattatcacattagtcaaaattccgcgaatgatccttatgtatantcacagtcagctcaaaggaaaggaaaatgcntgngcacgatgngtgctgaaatcttgcaattgttgcctttggtgtcttgaaaagngcctaaattatttaaatcanaatgcatacacagccacagctatcaacagcaccaacttctgcacctcagcaaaggatgcctttgtcattctggtggagaatgctttgcgagtggctaccatcaacacagtangagattttatgttattccttggcaaggtgctgatagtctgcagcacangtttanctgggattatgctgctcnactaccancaggactacacagtangggngctgcctcngatcatcgnctgcntcnttgctttcctaggcncncattgcntcntggctatttangaaaagggnaggggangcatnattcctggggntttgccatggaaanaaaaaaacnanganggaagccccgggcaaaaaattcnananggaaaacnggnngaaggagnttggngnaaaaccnaagaaanccatgaaaaaaactggtaanggagncncccctnatnccaaaaacaaaanccancctaaaaaaaagggactgncncctnaaccctnaaaangaacccnnanaggnnnttancnggggttnccccncccnaatntnaaaannnccantttnaaaanggnttttntnttnnannaannnnnnaanttttnaancccnaaanccnnngntttnnaanggggnnnnnnnnnntnnnnnncnnaaannnnnnnnnnnnnnnnnnnnnnnnnnnn

SEQ ID NO: 443 - DNA, 1339 bp, Homo Sapiens
  misc_feature (12)..(12): n is a, c, g, or t
  misc_feature (95)..(95): n is a, c, g, or t
  misc_feature (101)..(101): n is a, c, g, or t
  misc_feature (105)..(105): n is a, c, g, or t
  misc_feature (110)..(110): n is a, c, g, or t
  misc_feature (113)..(113): n is a, c, g, or t
  misc_feature (121)..(121): n is a, c, g, or t
  misc_feature (127)..(127): n is a, c, g, or t
  misc_feature (138)..(138): n is a, c, g, or t
  misc_feature (143)..(144): n is a, c, g, or t
  misc_feature (153)..(153): n is a, c, g, or t
  misc_feature (157)..(157): n is a, c, g, or t
  misc_feature (167)..(167): n is a, c, g, or t
  misc_feature (171)..(171): n is a, c, g, or t
  misc_feature (176)..(178): n is a, c, g, or t
  misc_feature (187)..(189): n is a, c, g, or t
  misc_feature (195)..(196): n is a, c, g, or t
  misc_feature (203)..(203): n is a, c, g, or t
  misc_feature (209)..(211): n is a, c, g, or t
  misc_feature (213)..(214): n is a, c, g, or t
  misc_feature (221)..(222): n is a, c, g, or t
  misc_feature (225)..(225): n is a, c, g, or t
  misc_feature (228)..(228): n is a, c, g, or t
  misc_feature (236)..(236): n is a, c, g, or t
  misc_feature (238)..(238): n is a, c, g, or t
  misc_feature (241)..(241): n is a, c, g, or t
  misc_feature (245)..(245): n is a, c, g, or t
  misc_feature (247)..(248): n is a, c, g, or t
  misc_feature (259)..(261): n is a, c, g, or t
  misc_feature (269)..(271): n is a, c, g, or t
  misc_feature (273)..(273): n is a, c, g, or t
  misc_feature (277)..(278): n is a, c, g, or t
  misc_feature (282)..(282): n is a, c, g, or t
  misc_feature (285)..(285): n is a, c, g, or t
  misc_feature (287)..(287): n is a, c, g, or t
  misc_feature (294)..(294): n is a, c, g, or t
  misc_feature (301)..(301): n is a, c, g, or t
  misc_feature (303)..(304): n is a, c, g, or t
  misc_feature (306)..(306): n is a, c, g, or t
  misc_feature (309)..(309): n is a, c, g, or t
  misc_feature (311)..(313): n is a, c, g, or t
  misc_feature (317)..(318): n is a, c, g, or t
  misc_feature (323)..(325): n is a, c, g, or t
  misc_feature (329)..(329): n is a, c, g, or t
  misc_feature (333)..(334): n is a, c, g, or t
  misc_feature (338)..(339): n is a, c, g, or t
  misc_feature (341)..(341): n is a, c, g, or t
  misc_feature (354)..(354): n is a, c, g, or t
  misc_feature (382)..(382): n is a, c, g, or t
  misc_feature (393)..(393): n is a, c, g, or t
  misc_feature (398)..(398): n is a, c, g, or t
  misc_feature (402)..(402): n is a, c, g, or t
  misc_feature (414)..(414): n is a, c, g, or t
  misc_feature (446)..(446): n is a, c, g, or t
  misc_feature (448)..(448): n is a, c, g, or t
  misc_feature (459)..(460): n is a, c, g, or t
  misc_feature (472)..(472): n is a, c, g, or t
  misc_feature (478)..(478): n is a, c, g, or t
  misc_feature (491)..(491): n is a, c, g, or t
  misc_feature (493)..(493): n is a, c, g, or t
  misc_feature (511)..(511): n is a, c, g, or t
  misc_feature (518)..(518): n is a, c, g, or t
  misc_feature (531)..(531): n is a, c, g, or t
  misc_feature (534)..(534): n is a, c, g, or t
  misc_feature (545)..(546): n is a, c, g, or t
  misc_feature (548)..(548): n is a, c, g, or t
  misc_feature (550)..(550): n is a, c, g, or t
  misc_feature (553)..(553): n is a, c, g, or t
  misc_feature (555)..(555): n is a, c, g, or t
  misc_feature (567)..(567): n is a, c, g, or t
  misc_feature (569)..(569): n is a, c, g, or t
  misc_feature (576)..(576): n is a, c, g, or t
  misc_feature (600)..(600): n is a, c, g, or t
  misc_feature (602)..(602): n is a, c, g, or t
  misc_feature (647)..(647): n is a, c, g, or t
  misc_feature (662)..(663): n is a, c, g, or t
  misc_feature (670)..(672): n is a, c, g, or t
  misc_feature (676)..(676): n is a, c, g, or t
  misc_feature (680)..(680): n is a, c, g, or t
  misc_feature (682)..(682): n is a, c, g, or t
  misc_feature (686)..(686): n is a, c, g, or t
  misc_feature (691)..(691): n is a, c, g, or t
  misc_feature (693)..(693): n is a, c, g, or t
  misc_feature (700)..(700): n is a, c, g, or t
  misc_feature (713)..(713): n is a, c, g, or t
  misc_feature (732)..(732): n is a, c, g, or t
  misc_feature (734)..(734): n is a, c, g, or t
  misc_feature (749)..(750): n is a, c, g, or t
  misc_feature (766)..(766): n is a, c, g, or t
  misc_feature (769)..(771): n is a, c, g, or t
  misc_feature (773)..(774): n is a, c, g, or t
  misc_feature (778)..(778): n is a, c, g, or t
  misc_feature (787)..(789): n is a, c, g, or t
  misc_feature (791)..(791): n is a, c, g, or t
  misc_feature (794)..(794): n is a, c, g, or t
  misc_feature (806)..(806): n is a, c, g, or t
  misc_feature (836)..(837): n is a, c, g, or t
  misc_feature (843)..(846): n is a, c, g, or t
  misc_feature (851)..(851): n is a, c, g, or t
  misc_feature (854)..(854): n is a, c, g, or t
  misc_feature (857)..(857): n is a, c, g, or t
  misc_feature (862)..(862): n is a, c, g, or t
  misc_feature (876)..(876): n is a, c, g, or t
  misc_feature (882)..(882): n is a, c, g, or t
  misc_feature (885)..(887): n is a, c, g, or t
  misc_feature (890)..(890): n is a, c, g, or t
  misc_feature (902)..(902): n is a, c, g, or t
  misc_feature (922)..(923): n is a, c, g, or t
  misc_feature (927)..(928): n is a, c, g, or t
  misc_feature (932)..(932): n is a, c, g, or t
  misc_feature (942)..(943): n is a, c, g, or t
  misc_feature (949)..(949): n is a, c, g, or t
  misc_feature (953)..(953): n is a, c, g, or t
  misc_feature (955)..(955): n is a, c, g, or t
  misc_feature (968)..(968): n is a, c, g, or t
  misc_feature (974)..(974): n is a, c, g, or t
  misc_feature (977)..(977): n is a, c, g, or t
  misc_feature (984)..(984): n is a, c, g, or t
  misc_feature (991)..(991): n is a, c, g, or t
  misc_feature (993)..(993): n is a, c, g, or t
  misc_feature (995)..(995): n is a, c, g, or t
  misc_feature (1002)..(1002): n is a, c, g, or t
  misc_feature (1010)..(1010): n is a, c, g, or t
  misc_feature (1017)..(1017): n is a, c, g, or t
  misc_feature (1021)..(1021): n is a, c, g, or t
  misc_feature (1030)..(1032): n is a, c, g, or t
  misc_feature (1036)..(1036): n is a, c, g, or t
  misc_feature (1044)..(1045): n is a, c, g, or t
  misc_feature (1053)..(1054): n is a, c, g, or t
  misc_feature (1056)..(1056): n is a, c, g, or t
  misc_feature (1061)..(1061): n is a, c, g, or t
  misc_feature (1066)..(1066): n is a, c, g, or t
  misc_feature (1070)..(1072): n is a, c, g, or t
  misc_feature (1076)..(1077): n is a, c, g, or t
  misc_feature (1080)..(1080): n is a, c, g, or t
  misc_feature (1083)..(1083): n is a, c, g, or t
  misc_feature (1086)..(1086): n is a, c, g, or t
  misc_feature (1091)..(1091): n is a, c, g, or t
  misc_feature (1095)..(1095): n is a, c, g, or t
  misc_feature (1099)..(1099): n is a, c, g, or t
  misc_feature (1102)..(1102): n is a, c, g, or t
  misc_feature (1104)..(1104): n is a, c, g, or t
  misc_feature (1107)..(1108): n is a, c, g, or t
  misc_feature (1110)..(1110): n is a, c, g, or t
  misc_feature (1116)..(1116): n is a, c, g, or t
  misc_feature (1118)..(1118): n is a, c, g, or t
  misc_feature (1121)..(1121): n is a, c, g, or t
  misc_feature (1134)..(1134): n is a, c, g, or t
  misc_feature (1140)..(1140): n is a, c, g, or t
  misc_feature (1145)..(1145): n is a, c, g, or t
  misc_feature (1150)..(1150): n is a, c, g, or t
  misc_feature (1153)..(1153): n is a, c, g, or t
  misc_feature (1156)..(1156): n is a, c, g, or t
  misc_feature (1158)..(1158): n is a, c, g, or t
  misc_feature (1175)..(1175): n is a, c, g, or t
  misc_feature (1177)..(1178): n is a, c, g, or t
  misc_feature (1184)..(1184): n is a, c, g, or t
  misc_feature (1191)..(1191): n is a, c, g, or t
  misc_feature (1193)..(1193): n is a, c, g, or t
  misc_feature (1196)..(1196): n is a, c, g, or t
  misc_feature (1208)..(1208): n is a, c, g, or t
  misc_feature (1212)..(1213): n is a, c, g, or t
  misc_feature (1216)..(1218): n is a, c, g, or t
  misc_feature (1223)..(1223): n is a, c, g, or t
  misc_feature (1227)..(1227): n is a, c, g, or t
  misc_feature (1229)..(1229): n is a, c, g, or t
  misc_feature (1232)..(1232): n is a, c, g, or t
  misc_feature (1237)..(1237): n is a, c, g, or t
  misc_feature (1241)..(1242): n is a, c, g, or t
  misc_feature (1253)..(1253): n is a, c, g, or t
  misc_feature (1255)..(1255): n is a, c, g, or t
  misc_feature (1258)..(1258): n is a, c, g, or t
  misc_feature (1261)..(1261): n is a, c, g, or t
  misc_feature (1265)..(1265): n is a, c, g, or t
  misc_feature (1267)..(1270): n is a, c, g, or t
  misc_feature (1282)..(1283): n is a, c, g, or t
  misc_feature (1287)..(1288): n is a, c, g, or t
  misc_feature (1292)..(1292): n is a, c, g, or t
  misc_feature (1305)..(1306): n is a, c, g, or t
  misc_feature (1309)..(1311): n is a, c, g, or t
  misc_feature (1313)..(1313): n is a, c, g, or t
  misc_feature (1315)..(1315): n is a, c, g, or t
  misc_feature (1321)..(1322): n is a, c, g, or t
  misc_feature (1325)..(1325): n is a, c, g, or t
  misc_feature (1328)..(1330): n is a, c, g, or t
  misc_feature (1335)..(1335): n is a, c, g, or t
  misc_feature (1339)..(1339): n is a, c, g, or t
aattagagaganttactatgagaggatcgcatcaccatcaccatcacggatcctatttaggtgacactatagaatcgtcgacccacgcgtccgcncacgcntgtnatatnacntgtttttntactancgtggaagganccatnnccactctcnttcncgtgaaaccncttnaaggnnntttggcgannnttatannatttccnttttannnannagaaaanntgnacncagcttgngnganaacngnnacctggaatannntgtgtgtnnngngaanncccnaancngggtcanctcctcnanntncangnnnaccnngaccnnngggnctannaggnncngctgctttgttgnatacctcctcctcccttctttctttganacctaatgtgnccacnttcnatatggactccnacaagctgataacgcatctgagaggtatggananactgaggatcnngaaaactgatantgtgangtcacacaacgancnctcacgcatggcgtgatnaggtgcnaatgaactagggnctncattggtcttnntngnagncnataccattactncnttgcatntctgctgtcaaaaggattcctggncnctaagccctggcttgcacagtctatactgggtgtctacctctatnaaccactgacttctnnggtcctnnntctngtcnanaggnttgcnanagagacncacctctccttgnaggtctgccccaactgacngnagatacacatgattnngtctagaacttgatgngannngnnacgnaccttgtannngntcntagcctcttatnaaaccaatggaaagaaagttaaggaaatcnngctccnnnntgagnacngancacgnaatggtgagccaantgtggnccnnnttntttccagtaaantcttcccccaaactttttgnngganntganaacctgggannttcttnattngnattatttccaaantttgtnttnaaaaagnttttaancncnaattggnggactttnagccccntccnaaatagccnnnttgnaaaaatanntggggganntnttacngtaancccnnntttnnaanggnggnaaaanaaantccntgngnaanngnaaaaananttnctaaaaaaccccnttgggnaaaanggggnggncanantgaaaaaattttttttncnnataacnccaaaantnaantttttacccccnaaannggnnnggggncttnanggnggggntaannattttaaaaananttnccntttntnnnnaaaaccgggggnntttnnggtnaaaaaaatttccnntannncntncttttnnaanacnnnttttntttn

SEQ ID NO: 444 - DNA, 1327 bp, Homo Sapiens
  misc_feature (1)..(1): n is a, c, g, or t
  misc_feature (785)..(785): n is a, c, g, or t
  misc_feature (794)..(794): n is a, c, g, or t
  misc_feature (806)..(806): n is a, c, g, or t
  misc_feature (814)..(814): n is a, c, g, or t
  misc_feature (844)..(844): n is a, c, g, or t
  misc_feature (847)..(847): n is a, c, g, or t
  misc_feature (931)..(931): n is a, c, g, or t
  misc_feature (942)..(942): n is a, c, g, or t
  misc_feature (951)..(952): n is a, c, g, or t
  misc_feature (956)..(956): n is a, c, g, or t
  misc_feature (958)..(958): n is a, c, g, or t
  misc_feature (964)..(964): n is a, c, g, or t
  misc_feature (980)..(981): n is a, c, g, or t
  misc_feature (997)..(997): n is a, c, g, or t
  misc_feature (999)..(999): n is a, c, g, or t
  misc_feature (1005)..(1005): n is a, c, g, or t
  misc_feature (1011)..(1011): n is a, c, g, or t
  misc_feature (1013)..(1013): n is a, c, g, or t
  misc_feature (1015)..(1016): n is a, c, g, or t
  misc_feature (1021)..(1021): n is a, c, g, or t
  misc_feature (1024)..(1024): n is a, c, g, or t
  misc_feature (1034)..(1035): n is a, c, g, or t
  misc_feature (1048)..(1048): n is a, c, g, or t
  misc_feature (1055)..(1055): n is a, c, g, or t
  misc_feature (1059)..(1059): n is a, c, g, or t
  misc_feature (1064)..(1064): n is a, c, g, or t
  misc_feature (1068)..(1068): n is a, c, g, or t
  misc_feature (1073)..(1073): n is a, c, g, or t
  misc_feature (1075)..(1076): n is a, c, g, or t
  misc_feature (1078)..(1079): n is a, c, g, or t
  misc_feature (1087)..(1087): n is a, c, g, or t
  misc_feature (1093)..(1093): n is a, c, g, or t
  misc_feature (1095)..(1098): n is a, c, g, or t
  misc_feature (1102)..(1102): n is a, c, g, or t
  misc_feature (1113)..(1114): n is a, c, g, or t
  misc_feature (1117)..(1117): n is a, c, g, or t
  misc_feature (1120)..(1120): n is a, c, g, or t
  misc_feature (1122)..(1122): n is a, c, g, or t
  misc_feature (1126)..(1127): n is a, c, g, or t
  misc_feature (1134)..(1134): n is a, c, g, or t
  misc_feature (1141)..(1141): n is a, c, g, or t
  misc_feature (1146)..(1146): n is a, c, g, or t
  misc_feature (1151)..(1151): n is a, c, g, or t
  misc_feature (1153)..(1154): n is a, c, g, or t
  misc_feature (1164)..(1164): n is a, c, g, or t
  misc_feature (1168)..(1168): n is a, c, g, or t
  misc_feature (1178)..(1178): n is a, c, g, or t
  misc_feature (1184)..(1184): n is a, c, g, or t
  misc_feature (1202)..(1203): n is a, c, g, or t
  misc_feature (1207)..(1207): n is a, c, g, or t
  misc_feature (1209)..(1209): n is a, c, g, or t
  misc_feature (1212)..(1213): n is a, c, g, or t
  misc_feature (1215)..(1215): n is a, c, g, or t
  misc_feature (1217)..(1217): n is a, c, g, or t
  misc_feature (1221)..(1221): n is a, c, g, or t
  misc_feature (1225)..(1226): n is a, c, g, or t
  misc_feature (1228)..(1228): n is a, c, g, or t
  misc_feature (1230)..(1230): n is a, c, g, or t
  misc_feature (1233)..(1234): n is a, c, g, or t
  misc_feature (1237)..(1237): n is a, c, g, or t
  misc_feature (1249)..(1250): n is a, c, g, or t
  misc_feature (1253)..(1255): n is a, c, g, or t
  misc_feature (1263)..(1263): n is a, c, g, or t
  misc_feature (1266)..(1266): n is a, c, g, or t
  misc_feature (1280)..(1284): n is a, c, g, or t
  misc_feature (1287)..(1289): n is a, c, g, or t
  misc_feature (1293)..(1299): n is a, c, g, or t
  misc_feature (1301)..(1301): n is a, c, g, or t
  misc_feature (1303)..(1305): n is a, c, g, or t
  misc_feature (1307)..(1307): n is a, c, g, or t
  misc_feature (1309)..(1309): n is a, c, g, or t
  misc_feature (1320)..(1320): n is a, c, g, or t
  misc_feature (1323)..(1324): n is a, c, g, or t
  misc_feature (1326)..(1327): n is a, c, g, or t
naatagagagattactatgagaggatcgcatcaccatcaccatcacggatcctatttaggtgacactatagaatcgtcgacccacgcgtccgcccacgcgtccgagatcacatgcaggataccacgggaaggagccatctccactctccttctccagaacccccttgaagggcctttgggaccattagtccatttccattttacagacaaggaaatcaagacccagcttgggggaaaagccacccctggagtcacctgtgtgttcagtggcacccccagcctgggtcccctcctcccaatagaggctgagccggagccagggcagtatgaggtggggctgccactgcccatacctcctcctcccttctttctttgaagcctaatggccccccaaaagatgggcaggacaagctgtagcccatctgagaggttgggaaactgaggcccagaaacaggaagtgactcacacaagacccctcagcaagggtgcaaagggggaagaactaggggctccattgttcttcaggcgacaggagaccgttgctccagtgcatgtctgctgggacaaggattcctggcctcgaagccctgggctgcacagccctactgggctccacctctataaaccagtgacttctctgggcctgggtctgggggagagggttgccagggagactcagctctccttgggggctggcccagctgactgagggtacacaggattgggtctagaccttgatgcctgggtggagggcccttgtaaggggccatagcctcttcaggancaactgganggaagagttagnaacaccanctcctgcctggggcagtgagggaatgggancanctgtgggcgcctcatttcaggcaagtcctccccaaaccttcaaatgcagtgagacctggccttcctgttgtgctttttcaaaantttgttttcanaaagctttnnttcnantggggncctttcggcccttcannaaaaaccccctggggnanaaaggngggggncngnngcccntcntccccatttnnaaaacaagggaanttaaagntccngggangggnaaatngnntnnccttaagntccccncnnnntttnttggggggggnnagnatngnaaannggtttcnccaaaancccanaaatncnntttttttaancccnaaagggaaanaggggntttaggggggggtttttnntttncnaanncnanttcntttnncnanaannccnggggggtttttnnggnnnaaaaaaanaanaatcccccccttgnnnnnaannntttnnnnnnnangnnncntnttttttttttngannann

SEQ ID NO: 445 - DNA, 1316 bp, Homo Sapiens
  misc_feature (602)..(602): n is a, c, g, or t
  misc_feature (687)..(687): n is a, c, g, or t
  misc_feature (769)..(769): n is a, c, g, or t
  misc_feature (827)..(827): n is a, c, g, or t
  misc_feature (859)..(859): n is a, c, g, or t
  misc_feature (878)..(878): n is a, c, g, or t
  misc_feature (890)..(890): n is a, c, g, or t
  misc_feature (900)..(900): n is a, c, g, or t
  misc_feature (906)..(906): n is a, c, g, or t
  misc_feature (923)..(923): n is a, c, g, or t
  misc_feature (933)..(933): n is a, c, g, or t
  misc_feature (943)..(943): n is a, c, g, or t
  misc_feature (945)..(945): n is a, c, g, or t
  misc_feature (950)..(950): n is a, c, g, or t
  misc_feature (956)..(956): n is a, c, g, or t
  misc_feature (959)..(959): n is a, c, g, or t
  misc_feature (976)..(976): n is a, c, g, or t
  misc_feature (992)..(992): n is a, c, g, or t
  misc_feature (1000)..(1000): n is a, c, g, or t
  misc_feature (1005)..(1005): n is a, c, g, or t
  misc_feature (1009)..(1009): n is a, c, g, or t
  misc_feature (1017)..(1018): n is a, c, g, or t
  misc_feature (1023)..(1023): n is a, c, g, or t
  misc_feature (1034)..(1034): n is a, c, g, or t
  misc_feature (1042)..(1042): n is a, c, g, or t
  misc_feature (1046)..(1046): n is a, c, g, or t
  misc_feature (1051)..(1051): n is a, c, g, or t
  misc_feature (1075)..(1075): n is a, c, g, or t
  misc_feature (1086)..(1086): n is a, c, g, or t
  misc_feature (1089)..(1089): n is a, c, g, or t
  misc_feature (1119)..(1119): n is a, c, g, or t
  misc_feature (1122)..(1122): n is a, c, g, or t
  misc_feature (1131)..(1132): n is a, c, g, or t
  misc_feature (1138)..(1139): n is a, c, g, or t
  misc_feature (1147)..(1147): n is a, c, g, or t
  misc_feature (1150)..(1150): n is a, c, g, or t
  misc_feature (1152)..(1152): n is a, c, g, or t
  misc_feature (1159)..(1159): n is a, c, g, or t
  misc_feature (1171)..(1171): n is a, c, g, or t
  misc_feature (1173)..(1173): n is a, c, g, or t
  misc_feature (1178)..(1179): n is a, c, g, or t
  misc_feature (1182)..(1182): n is a, c, g, or t
  misc_feature (1184)..(1184): n is a, c, g, or t
  misc_feature (1188)..(1189): n is a, c, g, or t
  misc_feature (1195)..(1195): n is a, c, g, or t
  misc_feature (1198)..(1199): n is a, c, g, or t
  misc_feature (1204)..(1204): n is a, c, g, or t
  misc_feature (1206)..(1206): n is a, c, g, or t
  misc_feature (1209)..(1209): n is a, c, g, or t
  misc_feature (1212)..(1213): n is a, c, g, or t
  misc_feature (1217)..(1218): n is a, c, g, or t
  misc_feature (1220)..(1221): n is a, c, g, or t
  misc_feature (1223)..(1223): n is a, c, g, or t
  misc_feature (1226)..(1226): n is a, c, g, or t
  misc_feature (1230)..(1230): n is a, c, g, or t
  misc_feature (1232)..(1232): n is a, c, g, or t
  misc_feature (1234)..(1234): n is a, c, g, or t
  misc_feature (1237)..(1240): n is a, c, g, or t
  misc_feature (1242)..(1243): n is a, c, g, or t
  misc_feature (1247)..(1248): n is a, c, g, or t
  misc_feature (1253)..(1253): n is a, c, g, or t
  misc_feature (1257)..(1257): n is a, c, g, or t
  misc_feature (1261)..(1261): n is a, c, g, or t
  misc_feature (1265)..(1267): n is a, c, g, or t
  misc_feature (1270)..(1274): n is a, c, g, or t
  misc_feature (1278)..(1279): n is a, c, g, or t
  misc_feature (1284)..(1284): n is a, c, g, or t
  misc_feature (1286)..(1287): n is a, c, g, or t
  misc_feature (1299)..(1300): n is a, c, g, or t
  misc_feature (1306)..(1306): n is a, c, g, or t
  misc_feature (1313)..(1316): n is a, c, g, or t
aatagagaaattactatgagaggatcgcatcaccatcaccatcacggatcctatttaggtgacactatagaatcgtcgacccacgcgtccggctggcggccttcgcccggcagctgggcagccgctattttgcgctggtggagcggcggctggcgcaggagcagggtggtggtgacaactcactgctggtgcgggcgctggaccgcttccaccggcgcttgcgggctcccggggccctgctggccgctgccgggctcgcagacgctgccacggagatcgtggaacgagtggcccgcgagcgcctgggccaccacctgcagggtctccgggcggccttcctgggctgcctgacagacgtccgccaggcgctggcagcacctcgcgtggctgggaaggagggccctggcctggccgagttgctggccaatgtggccagctccatcctgagccacattaaggcctctctggcagcagtgcaccttttcaccgccaaagaggtgtccttctccaacaagccctacttccggggtgagttctgcagtcagggtgtccgtgagggcctcatcgtgggcttcgtccactctatgtgccagacggctcanagcttctgcgacagccctggggagaaggggggtgccacaccacctgccctgctcctgctgctctcccgcctctgcctggactacnagacggccaccatctcctacatcctcactctcactgatgaacagtttctggtgcaggatcagttcccagtgacgcccgtgancacgctgtgtgcaaaagccagggaaacggcgcggcggctgctgacccactacgtgaangtgcagggcctggtcatatcacaaatgctgcncaaaaaacgtggaaactcncgactggctcancactctgganccccgnaatgtgcgggccgtcangaaaccgggnggtggaaganancaccnccatcnacntgcagtggggctcctgnaaaaaaaggtgttccnaaagcccnaaaanaacnaactccannaaaanaattttttccntgaaaaanaaanttttnggaaaaagggcccctaaccccccnaataaaccccnagngccccaagaaaacaacttttttaaaaaaantcnaaaactatnnttaaannatttattnttnanccctggnaattaaaaaggntnggggnnaangnatannaaaaanccnnaaaancnttnaanngggnngnncnccncttngncnttnnnntnnaaannaaaanaaancccntttnnnccnnnnngggnnttttngnnaaaaaaaatttnntttttnaaaaaannnn

SEQ ID NO: 446 - DNA, 1329 bp, Homo Sapiens
  misc_feature (696)..(696): n is a, c, g, or t
  misc_feature (700)..(704): n is a, c, g, or t
  misc_feature (706)..(803): n is a, c, g, or t
  misc_feature (815)..(815): n is a, c, g, or t
  misc_feature (826)..(827): n is a, c, g, or t
  misc_feature (830)..(830): n is a, c, g, or t
  misc_feature (836)..(838): n is a, c, g, or t
  misc_feature (846)..(848): n is a, c, g, or t
  misc_feature (861)..(861): n is a, c, g, or t
  misc_feature (864)..(865): n is a, c, g, or t
  misc_feature (870)..(871): n is a, c, g, or t
  misc_feature (878)..(880): n is a, c, g, or t
  misc_feature (885)..(885): n is a, c, g, or t
  misc_feature (889)..(889): n is a, c, g, or t
  misc_feature (891)..(891): n is a, c, g, or t
  misc_feature (899)..(900): n is a, c, g, or t
  misc_feature (907)..(907): n is a, c, g, or t
  misc_feature (912)..(912): n is a, c, g, or t
  misc_feature (915)..(916): n is a, c, g, or t
  misc_feature (926)..(926): n is a, c, g, or t
  misc_feature (930)..(930): n is a, c, g, or t
  misc_feature (943)..(943): n is a, c, g, or t
  misc_feature (951)..(951): n is a, c, g, or t
  misc_feature (953)..(955): n is a, c, g, or t
  misc_feature (957)..(957): n is a, c, g, or t
  misc_feature (964)..(964): n is a, c, g, or t
  misc_feature (972)..(972): n is a, c, g, or t
  misc_feature (976)..(977): n is a, c, g, or t
  misc_feature (982)..(982): n is a, c, g, or t
  misc_feature (984)..(985): n is a, c, g, or t
  misc_feature (990)..(990): n is a, c, g, or t
  misc_feature (993)..(993): n is a, c, g, or t
  misc_feature (1001)..(1002): n is a, c, g, or t
  misc_feature (1004)..(1004): n is a, c, g, or t
  misc_feature (1010)..(1011): n is a, c, g, or t
  misc_feature (1016)..(1016): n is a, c, g, or t
  misc_feature (1030)..(1030): n is a, c, g, or t
  misc_feature (1034)..(1034): n is a, c, g, or t
  misc_feature (1037)..(1037): n is a, c, g, or t
  misc_feature (1046)..(1046): n is a, c, g, or t
  misc_feature (1051)..(1052): n is a, c, g, or t
  misc_feature (1055)..(1055): n is a, c, g, or t
  misc_feature (1060)..(1066): n is a, c, g, or t
  misc_feature (1068)..(1068): n is a, c, g, or t
  misc_feature (1071)..(1071): n is a, c, g, or t
  misc_feature (1073)..(1073): n is a, c, g, or t
  misc_feature (1075)..(1075): n is a, c, g, or t
  misc_feature (1077)..(1078): n is a, c, g, or t
  misc_feature (1084)..(1084): n is a, c, g, or t
  misc_feature (1089)..(1089): n is a, c, g, or t
  misc_feature (1091)..(1091): n is a, c, g, or t
  misc_feature (1094)..(1097): n is a, c, g, or t
  misc_feature (1106)..(1107): n is a, c, g, or t
  misc_feature (1110)..(1110): n is a, c, g, or t
  misc_feature (1119)..(1119): n is a, c, g, or t
  misc_feature (1122)..(1123): n is a, c, g, or t
  misc_feature (1135)..(1135): n is a, c, g, or t
  misc_feature (1137)..(1137): n is a, c, g, or t
  misc_feature (1139)..(1140): n is a, c, g, or t
  misc_feature (1147)..(1148): n is a, c, g, or t
  misc_feature (1150)..(1152): n is a, c, g, or t
  misc_feature (1156)..(1157): n is a, c, g, or t
  misc_feature (1160)..(1161): n is a, c, g, or t
  misc_feature (1166)..(1167): n is a, c, g, or t
  misc_feature (1173)..(1173): n is a, c, g, or t
  misc_feature (1178)..(1180): n is a, c, g, or t
  misc_feature (1187)..(1187): n is a, c, g, or t
  misc_feature (1196)..(1199): n is a, c, g, or t
  misc_feature (1208)..(1214): n is a, c, g, or t
  misc_feature (1221)..(1222): n is a, c, g, or t
  misc_feature (1227)..(1227): n is a, c, g, or t
  misc_feature (1230)..(1230): n is a, c, g, or t
  misc_feature (1233)..(1233): n is a, c, g, or t
  misc_feature (1237)..(1237): n is a, c, g, or t
  misc_feature (1239)..(1241): n is a, c, g, or t
  misc_feature (1246)..(1247): n is a, c, g, or t
  misc_feature (1259)..(1259): n is a, c, g, or t
  misc_feature (1266)..(1267): n is a, c, g, or t
  misc_feature (1269)..(1272): n is a, c, g, or t
  misc_feature (1286)..(1289): n is a, c, g, or t
  misc_feature (1293)..(1293): n is a, c, g, or t
  misc_feature (1297)..(1297): n is a, c, g, or t
  misc_feature (1306)..(1306): n is a, c, g, or t
  misc_feature (1311)..(1315): n is a, c, g, or t
  misc_feature (1319)..(1322): n is a, c, g, or t
  misc_feature (1325)..(1329): n is a, c, g, or t
agagaaattactatgagaggatcgcatcaccatcaccatcacggatcctatttaggtgacactatagaatcgtcgacccacgcgtccgagggagctcaggggacagataagggaaggacgccccctgactccaggcccctgagcctggcgggaagtggctgcggcccaggcagccagtcctggtggtgttctccctgcatgccctccgtggctgggctgccaccccacccggcccgaatctgtcttgacctgcaggaatacacgggcggcgccaggcattacctcacagcgggactacacagttgctggctttgctcctgggcaaggaggagcaggccagagcctcttttgcttccttttcttgcccatgccgcttctagaagccaggcacaggttgccaagaggtgacacgaaacaggaggaaactcagtgacctctgcctctcccacattcctccccgcgggggaggacctcgccgctctgaagagcaccgtgcacatgtgggtgcacaaacgtgggtgttggtgtggacggggcgcagatctccgtggatgaactgcgtctggactcttagattcataaaatattcgagggtttgggagtcacagaccctcccctctcctcagtgcactttggcatttgcacggtgtcttccccggacagcacagcaataaatggtgtgattgcgtggaaaanaaannnnnannnnnnnnnnnnnnnnnnnnnnnnnnnnnnnnnnnnnnnnnnnnnnnnnnnnnnnnnnnnnnnnnnnnnnnnnnnnnnnnnnnnnnnnnnnnnnnnnngggggggccccncccaaaagggnnccnaaaaannnttaataannnaacttggaccccnttnnaaaannccaaaannnccccnaaantncttttggnnttttttnaaaanccnngttgcccccngggntttttttttgggnaaaaaccnannnantttgggnaatttttngggnntaggnanntaaanggnaaaaaaanncngggaannccccntttaaatttcccangggntcnaaaaaaaanttttnnggnttttnnnnnnntnccnangnannaaaaancaaancnttnnnnggaaaatannccntttttaaanccnnaaaaaaaaaaancncnnttttttnngnnntttnntannttttnncccccnaaaannnccccccnaattttttnnnnaaaaaaaannnnnnnggaaaannaaaanttnccntttnannnttttnnaaaaaaaaaaanttttttnntnnnnaaaaaaaaaatttnnnntttnaaanattaaaaanggggnnnnnaaannnnttnnnnn

SEQ ID NO: 447 - DNA, 1342 bp, Homo Sapiens
  misc_feature (1)..(2): n is a, c, g, or t
  misc_feature (853)..(853): n is a, c, g, or t
  misc_feature (868)..(868): n is a, c, g, or t
  misc_feature (877)..(877): n is a, c, g, or t
  misc_feature (912)..(912): n is a, c, g, or t
  misc_feature (941)..(941): n is a, c, g, or t
  misc_feature (969)..(970): n is a, c, g, or t
  misc_feature (976)..(976): n is a, c, g, or t
  misc_feature (981)..(981): n is a, c, g, or t
  misc_feature (990)..(990): n is a, c, g, or t
  misc_feature (1001)..(1002): n is a, c, g, or t
  misc_feature (1039)..(1039): n is a, c, g, or t
  misc_feature (1042)..(1043): n is a, c, g, or t
  misc_feature (1048)..(1048): n is a, c, g, or t
  misc_feature (1055)..(1055): n is a, c, g, or t
  misc_feature (1058)..(1058): n is a, c, g, or t
  misc_feature (1061)..(1061): n is a, c, g, or t
  misc_feature (1067)..(1067): n is a, c, g, or t
  misc_feature (1086)..(1087): n is a, c, g, or t
  misc_feature (1110)..(1110): n is a, c, g, or t
  misc_feature (1118)..(1118): n is a, c, g, or t
  misc_feature (1122)..(1122): n is a, c, g, or t
  misc_feature (1125)..(1125): n is a, c, g, or t
  misc_feature (1131)..(1132): n is a, c, g, or t
  misc_feature (1140)..(1141): n is a, c, g, or t
  misc_feature (1147)..(1147): n is a, c, g, or t
  misc_feature (1149)..(1150): n is a, c, g, or t
  misc_feature (1158)..(1159): n is a, c, g, or t
  misc_feature (1161)..(1161): n is a, c, g, or t
  misc_feature (1164)..(1164): n is a, c, g, or t
  misc_feature (1166)..(1167): n is a, c, g, or t
  misc_feature (1171)..(1171): n is a, c, g, or t
  misc_feature (1175)..(1175): n is a, c, g, or t
  misc_feature (1180)..(1180): n is a, c, g, or t
  misc_feature (1185)..(1185): n is a, c, g, or t
  misc_feature (1196)..(1196): n is a, c, g, or t
  misc_feature (1200)..(1200): n is a, c, g, or t
  misc_feature (1202)..(1202): n is a, c, g, or t
  misc_feature (1206)..(1206): n is a, c, g, or t
  misc_feature (1211)..(1211): n is a, c, g, or t
  misc_feature (1215)..(1215): n is a, c, g, or t
  misc_feature (1219)..(1219): n is a, c, g, or t
  misc_feature (1227)..(1229): n is a, c, g, or t
  misc_feature (1233)..(1233): n is a, c, g, or t
  misc_feature (1236)..(1237): n is a, c, g, or t
  misc_feature (1241)..(1246): n is a, c, g, or t
  misc_feature (1249)..(1257): n is a, c, g, or t
  misc_feature (1259)..(1260): n is a, c, g, or t
  misc_feature (1264)..(1264): n is a, c, g, or t
  misc_feature (1267)..(1267): n is a, c, g, or t
  misc_feature (1269)..(1269): n is a, c, g, or t
  misc_feature (1271)..(1271): n is a, c, g, or t
  misc_feature (1273)..(1273): n is a, c, g, or t
  misc_feature (1279)..(1280): n is a, c, g, or t
  misc_feature (1282)..(1282): n is a, c, g, or t
  misc_feature (1284)..(1286): n is a, c, g, or t
  misc_feature (1293)..(1293): n is a, c, g, or t
  misc_feature (1295)..(1296): n is a, c, g, or t
  misc_feature (1298)..(1298): n is a, c, g, or t
  misc_feature (1301)..(1301): n is a, c, g, or t
  misc_feature (1309)..(1309): n is a, c, g, or t
  misc_feature (1313)..(1313): n is a, c, g, or t
  misc_feature (1316)..(1316): n is a, c, g, or t
  misc_feature (1319)..(1319): n is a, c, g, or t
  misc_feature (1335)..(1336): n is a, c, g, or t
  misc_feature (1341)..(1342): n is a, c, g, or t
nnaattagagaaattactatgagaggatcgcatcaccatcaccatcacggatcctatttaggtgacactatagaatcgtcgacccacgcgtccggcagcctcccccttgagccccctcgcttcccgacgttccgttcccccctgcccgccttctcccgccaccgccgccgccgccttccgcaggccgtttccaccgaggaaaaggaatcgtatcgtatgtccgctatccagaacctccactctttcgacccctttgctgatgcaagtaagggtgatgacctgcttcctgctggcactgaggattatatccatataagaattcaacagagaaacggcaggaagacccttactactgtccaagggatcgctgatgattacgataaaaagaaactagtgaaggcgtttaagaaaaagtttgcctgcaatggtactgtaattgagcatccggaatatggagaagtaattcagctacagggtgaccaacgcaagaacatatgccagttcctcgtagagattggactggctaaggacgatcagctgaaggttcatgggttttaagtgcttgtggctcactgaagcttaagtgaggatttccttgcaatgagtagaatttcccttctctcccttgtcacaggtttaaaaacctcacagcttgtataatgtaaccatttggggtccgcttttaacttggactagtgtaactccttcatgcaataaactgaaaagagccatgctgtctagtcttgaagtccctcatttaaacagaggtcaagcaataggcgcctggcagtgtcaagcctgaaaccaagcaataccgtcatgtttcagccaagccccagagccctaagattanaaacaactatgggcnggaacctcntcagctctccctctgcagagttccctacccctaanaaaatgttaccacctgaacagtcctcggngaatctgaaaggaaaagatggggtaagnnaaaacnccaanctgttctantaaaaaggganncttttggggggaaaatcccctgggggcctccaacccngannaaggnggaaaanaanctncaaaanaggcccctcttaccgctanngagggggaaaaggaaattctggntttgcccnaaanggnttgttnnaaccaaanntttccnanntaaggggnntnccnannttcnaaanggggngggcnacccttttttnaaantnaaanttttnaaangggnaaaaaatnnncaanggnncccnnnnnntgnnnnnnnnntnnaaanttngnantnaaaaanncncnnncccaggncnngnganaaaaaaangggnttnggntttttttccccccaannaaggnn

SEQ ID NO: 448 - DNA, 1308 bp, Homo Sapiens
  misc_feature (853)..(853): n is a, c, g, or t
  misc_feature (862)..(862): n is a, c, g, or t
  misc_feature (930)..(930): n is a, c, g, or t
  misc_feature (937)..(937): n is a, c, g, or t
  misc_feature (958)..(958): n is a, c, g, or t
  misc_feature (972)..(975): n is a, c, g, or t
  misc_feature (979)..(1051): n is a, c, g, or t
  misc_feature (1055)..(1055): n is a, c, g, or t
  misc_feature (1057)..(1057): n is a, c, g, or t
  misc_feature (1060)..(1060): n is a, c, g, or t
  misc_feature (1071)..(1071): n is a, c, g, or t
  misc_feature (1076)..(1077): n is a, c, g, or t
  misc_feature (1079)..(1079): n is a, c, g, or t
  misc_feature (1083)..(1083): n is a, c, g, or t
  misc_feature (1086)..(1087): n is a, c, g, or t
  misc_feature (1090)..(1091): n is a, c, g, or t
  misc_feature (1093)..(1093): n is a, c, g, or t
  misc_feature (1095)..(1098): n is a, c, g, or t
  misc_feature (1106)..(1107): n is a, c, g, or t
  misc_feature (1114)..(1114): n is a, c, g, or t
  misc_feature (1116)..(1116): n is a, c, g, or t
  misc_feature (1126)..(1128): n is a, c, g, or t
  misc_feature (1130)..(1131): n is a, c, g, or t
  misc_feature (1133)..(1133): n is a, c, g, or t
  misc_feature (1138)..(1139): n is a, c, g, or t
  misc_feature (1142)..(1144): n is a, c, g, or t
  misc_feature (1148)..(1149): n is a, c, g, or t
  misc_feature (1152)..(1153): n is a, c, g, or t
  misc_feature (1165)..(1166): n is a, c, g, or t
  misc_feature (1168)..(1169): n is a, c, g, or t
  misc_feature (1171)..(1171): n is a, c, g, or t
  misc_feature (1174)..(1175): n is a, c, g, or t
  misc_feature (1179)..(1180): n is a, c, g, or t
  misc_feature (1184)..(1184): n is a, c, g, or t
  misc_feature (1194)..(1194): n is a, c, g, or t
  misc_feature (1199)..(1199): n is a, c, g, or t
  misc_feature (1205)..(1205): n is a, c, g, or t
  misc_feature (1207)..(1209): n is a, c, g, or t
  misc_feature (1211)..(1211): n is a, c, g, or t
  misc_feature (1214)..(1215): n is a, c, g, or t
  misc_feature (1217)..(1218): n is a, c, g, or t
  misc_feature (1227)..(1227): n is a, c, g, or t
  misc_feature (1230)..(1234): n is a, c, g, or t
  misc_feature (1237)..(1239): n is a, c, g, or t
  misc_feature (1241)..(1241): n is a, c, g, or t
  misc_feature (1243)..(1244): n is a, c, g, or t
  misc_feature (1247)..(1248): n is a, c, g, or t
  misc_feature (1257)..(1257): n is a, c, g, or t
  misc_feature (1262)..(1262): n is a, c, g, or t
  misc_feature (1264)..(1264): n is a, c, g, or t
  misc_feature (1268)..(1275): n is a, c, g, or t
  misc_feature (1277)..(1277): n is a, c, g, or t
  misc_feature (1280)..(1280): n is a, c, g, or t
  misc_feature (1284)..(1288): n is a, c, g, or t
  misc_feature (1298)..(1299): n is a, c, g, or t
  misc_feature (1301)..(1301): n is a, c, g, or t
  misc_feature (1305)..(1308): n is a, c, g, or t
tagagagaattactatgagaggatcgcatcaccatcaccatcacggatcctatttaggtgacactatagaatcgtcgacccacgcgtccgggggccgccggcgccgcatccctctctacctgccaacatcctgtattagagaacttgtggccggaggtgtggctgtggagagctggccggggagggacgctgctcagctgctgctctgctcctgtctcctgtcccctcccccggtcatgacagagacccgtgagccagctgagactgggggctacgccagcttggaagaagatgatgaagacctttccccaggccccgagcattcctctgattcagaatacactctctcagagccggactccgaagaggaagaagatgaggaggaggaggaagaggagaccactgacgatcctgaatatgatcctggctacaaggtgaagcagcgccttggcgggggccgtggtggcccatcccgccgggccccccgtgcagcccagcccccggcccagccttgccagctctgtggccgctcaccccttggggaggccccaccgggaaccccaccctgccggctctgctgccctgctacagccccccaggaagcaccagcccctgaaggcagggccctcggggaggaagaggaggaaccacctcgggctggggagggccgaccagctgggcgggaggaggaggaggaagaggaggaggagggaacctaccactgtacggaatgtgaggattccttcgacaacctgggggagctgcacgggcacttcatgctgcatgcccggggtgaggtgtaggcagagcccccatacggggagcttggcaaaaggggtggggtgggaagganggggctgangaaattggggtttgtgacagtggtcatggggggatgggggtactgccgggtctgtgttgtcttaaaantaaatgngtgaatggccaaaaataaaancccaaaatctgttnnnnaaannnnnnnnnnnnnnnnnnnnnnnnnnnnnnnnnnnnnnnnnnnnnnnnnnnnnnnnnnnnnnnnnnnnnnnnngggngnccncccccctaaanggggnncnaaanaannttnntnannnnaacttggnncccctgntnaaaaaatccnnnanngnccccnnaannncccnnggnnttttttaaaaanncnngnttnncccnngggntttttttttnggggnaaaacnannnanttnngnnaaatttttnggnnnnngannntnannggnnaaaaaaccnggganancccnnnnnnnntnccngggnnnnnaaaaaatttnngntttnnnn

SEQ ID NO: 449 - DNA, 1318 bp, Homo Sapiens
  misc_feature (884)..(884): n is a, c, g, or t
  misc_feature (903)..(903): n is a, c, g, or t
  misc_feature (945)..(945): n is a, c, g, or t
  misc_feature (953)..(953): n is a, c, g, or t
  misc_feature (955)..(955): n is a, c, g, or t
  misc_feature (961)..(961): n is a, c, g, or t
  misc_feature (965)..(965): n is a, c, g, or t
  misc_feature (971)..(971): n is a, c, g, or t
  misc_feature (984)..(984): n is a, c, g, or t
  misc_feature (988)..(988): n is a, c, g, or t
  misc_feature (990)..(990): n is a, c, g, or t
  misc_feature (995)..(995): n is a, c, g, or t
  misc_feature (1001)..(1001): n is a, c, g, or t
  misc_feature (1008)..(1008): n is a, c, g, or t
  misc_feature (1011)..(1011): n is a, c, g, or t
  misc_feature (1015)..(1015): n is a, c, g, or t
  misc_feature (1021)..(1021): n is a, c, g, or t
  misc_feature (1026)..(1026): n is a, c, g, or t
  misc_feature (1034)..(1034): n is a, c, g, or t
  misc_feature (1040)..(1040): n is a, c, g, or t
  misc_feature (1044)..(1044): n is a, c, g, or t
  misc_feature (1050)..(1050): n is a, c, g, or t
  misc_feature (1054)..(1054): n is a, c, g, or t
  misc_feature (1064)..(1064): n is a, c, g, or t
  misc_feature (1066)..(1066): n is a, c, g, or t
  misc_feature (1071)..(1071): n is a, c, g, or t
  misc_feature (1073)..(1074): n is a, c, g, or t
  misc_feature (1080)..(1080): n is a, c, g, or t
  misc_feature (1083)..(1083): n is a, c, g, or t
  misc_feature (1096)..(1096): n is a, c, g, or t
  misc_feature (1098)..(1098): n is a, c, g, or t
  misc_feature (1112)..(1112): n is a, c, g, or t
  misc_feature (1115)..(1115): n is a, c, g, or t
  misc_feature (1120)..(1120): n is a, c, g, or t
  misc_feature (1128)..(1128): n is a, c, g, or t
  misc_feature (1130)..(1130): n is a, c, g, or t
  misc_feature (1132)..(1132): n is a, c, g, or t
  misc_feature (1135)..(1135): n is a, c, g, or t
  misc_feature (1139)..(1139): n is a, c, g, or t
  misc_feature (1142)..(1142): n is a, c, g, or t
  misc_feature (1144)..(1144): n is a, c, g, or t
  misc_feature (1146)..(1146): n is a, c, g, or t
  misc_feature (1148)..(1148): n is a, c, g, or t
  misc_feature (1157)..(1157): n is a, c, g, or t
  misc_feature (1159)..(1159): n is a, c, g, or t
  misc_feature (1161)..(1161): n is a, c, g, or t
  misc_feature (1163)..(1170): n is a, c, g, or t
  misc_feature (1173)..(1174): n is a, c, g, or t
  misc_feature (1178)..(1178): n is a, c, g, or t
  misc_feature (1181)..(1181): n is a, c, g, or t
  misc_feature (1186)..(1187): n is a, c, g, or t
  misc_feature (1189)..(1189): n is a, c, g, or t
  misc_feature (1193)..(1193): n is a, c, g, or t
  misc_feature (1196)..(1202): n is a, c, g, or t
  misc_feature (1205)..(1205): n is a, c, g, or t
  misc_feature (1208)..(1209): n is a, c, g, or t
  misc_feature (1212)..(1212): n is a, c, g, or t
  misc_feature (1214)..(1215): n is a, c, g, or t
  misc_feature (1219)..(1221): n is a, c, g, or t
  misc_feature (1223)..(1226): n is a, c, g, or t
  misc_feature (1231)..(1231): n is a, c, g, or t
  misc_feature (1235)..(1251): n is a, c, g, or t
  misc_feature (1254)..(1255): n is a, c, g, or t
  misc_feature (1258)..(1261): n is a, c, g, or t
  misc_feature (1263)..(1266): n is a, c, g, or t
  misc_feature (1269)..(1272): n is a, c, g, or t
  misc_feature (1276)..(1279): n is a, c, g, or t
  misc_feature (1287)..(1290): n is a, c, g, or t
  misc_feature (1293)..(1293): n is a, c, g, or t
  misc_feature (1295)..(1306): n is a, c, g, or t
  misc_feature (1310)..(1310): n is a, c, g, or t
  misc_feature (1312)..(1314): n is a, c, g, or t
  misc_feature (1318)..(1318): n is a, c, g, or t
tagagaaattactatgagaggatcgcatcaccatcaccatcacggatcctatttaggtgacactatagaatcgtcgacccacgcgtccggcggccggagcggcggcgggcgggccgagcagccggggcagccgcgcgtgggcatccacgggcgccgagcctccgtccgtgtctctatccctcccgggcctttgtcagcgcgcccgctgggagcggggccgagagcgccggttccagtcagacagccccgcaggtcagcggccgggccgagggcgccagagggggccatgtcgtaccagggcaagaagagcatcccgcacatcacgagtgaccgactcctcatcaaaggtggacggatcatcaacgatgaccaatccctttatgctgacgtctacctggaggatggacttatcaaacaaataggagagaacttaatcgttcctggtggagtgaagaccattgaagccaacgggcggatggttattcccggaggtattgatgtcaacacgtacctgcagaagccctcccaggggatgactgcggctgatgacttcttccaagggaccagggcggcactggtgggcgggaccacgatgatcattgaccatgttgttcctgaacctgggtccagcctactgacctctttcgagaagtggcacgaagcagctgacaccaaatcctgctgtgattactccctccacgtggacatcacaagctggtacgatggcgttcgggaggagctggaggtgctggtgcaggacaaaggcgtcaattccttccaagtctacatggcctataaggatgtctaccaaatgtccgacagccagctctatgaagcctttaccttccttaagggcctgggagctgtgatcttggtccatgcanaaaatggaaattttgatanctcaggaacaaaagcggatcctggaaatgggcatcacgggtncccgaggncntgcccntgancaaacntgaaaaactggangccnangcggngttccnggccatnacnttgnggccgnatcantgccctgngtactncccnaggtcntgancaaaatgcancnaattntnntttggncanaaaaaaggccccnantttttgaaaacccnttnccccncctgggancnanggncccnttntngnanaaaaatggncnangnnnnnnnnttnnaatnccntcccnnanccgnacnnnnnnnccnaannttnanncctnnngnnnnggggnattnnnnnnnnnnnnnnnnnttnntannnntnnnnaannnngggnnnnaaattttnnnnttncnnnnnnnnnnnnaaanannnaaan

SEQ ID NO: 450 - DNA, 1268 bp, Homo Sapiens
  misc_feature (1)..(1): n is a, c, g, or t
  misc_feature (857)..(857): n is a, c, g, or t
  misc_feature (863)..(863): n is a, c, g, or t
  misc_feature (968)..(968): n is a, c, g, or t
  misc_feature (977)..(977): n is a, c, g, or t
  misc_feature (988)..(988): n is a, c, g, or t
  misc_feature (1004)..(1004): n is a, c, g, or t
  misc_feature (1012)..(1012): n is a, c, g, or t
  misc_feature (1026)..(1027): n is a, c, g, or t
  misc_feature (1030)..(1071): n is a, c, g, or t
  misc_feature (1075)..(1075): n is a, c, g, or t
  misc_feature (1079)..(1079): n is a, c, g, or t
  misc_feature (1089)..(1090): n is a, c, g, or t
  misc_feature (1092)..(1092): n is a, c, g, or t
  misc_feature (1097)..(1097): n is a, c, g, or t
  misc_feature (1099)..(1099): n is a, c, g, or t
  misc_feature (1101)..(1101): n is a, c, g, or t
  misc_feature (1105)..(1105): n is a, c, g, or t
  misc_feature (1108)..(1108): n is a, c, g, or t
  misc_feature (1110)..(1110): n is a, c, g, or t
  misc_feature (1114)..(1116): n is a, c, g, or t
  misc_feature (1119)..(1120): n is a, c, g, or t
  misc_feature (1122)..(1122): n is a, c, g, or t
  misc_feature (1125)..(1126): n is a, c, g, or t
  misc_feature (1129)..(1129): n is a, c, g, or t
  misc_feature (1131)..(1133): n is a, c, g, or t
  misc_feature (1136)..(1136): n is a, c, g, or t
  misc_feature (1138)..(1139): n is a, c, g, or t
  misc_feature (1141)..(1146): n is a, c, g, or t
  misc_feature (1148)..(1148): n is a, c, g, or t
  misc_feature (1152)..(1153): n is a, c, g, or t
  misc_feature (1157)..(1157): n is a, c, g, or t
  misc_feature (1161)..(1163): n is a, c, g, or t
  misc_feature (1166)..(1166): n is a, c, g, or t
  misc_feature (1174)..(1174): n is a, c, g, or t
  misc_feature (1178)..(1178): n is a, c, g, or t
  misc_feature (1182)..(1185): n is a, c, g, or t
  misc_feature (1188)..(1188): n is a, c, g, or t
  misc_feature (1193)..(1193): n is a, c, g, or t
  misc_feature (1196)..(1196): n is a, c, g, or t
  misc_feature (1209)..(1209): n is a, c, g, or t
  misc_feature (1214)..(1214): n is a, c, g, or t
  misc_feature (1216)..(1222): n is a, c, g, or t
  misc_feature (1224)..(1224): n is a, c, g, or t
  misc_feature (1226)..(1228): n is a, c, g, or t
  misc_feature (1230)..(1230): n is a, c, g, or t
  misc_feature (1236)..(1236): n is a, c, g, or t
  misc_feature (1238)..(1252): n is a, c, g, or t
  misc_feature (1255)..(1256): n is a, c, g, or t
  misc_feature (1263)..(1266): n is a, c, g, or t
  misc_feature (1268)..(1268): n is a, c, g, or t
naattagagaaattactatgagaggatcgcatcaccatcaccatcacggatcctatttaggtgacactatagaatcgtcgacccacgcgtccgtgaaaactggagggccttcaaggctctcatcgctgctcagtacagcggggctcaggtccgcgtgctctccgcaccaccccacttccattttggccaaaccaaccgcacccctgaatttctccgcaaatttcctgccggcaaggtcccagcatttgagggtgaaactgtgtgagaagatggcccagtttgatgctaaaaagtttgcagagacccaacctaaaaaggacacaccacggaaagagaagggttcacgggaagagaagcagaagccccaggctgagcggaaggaggagaaaaaggcggctgcccctgctcctgaggaggagatggatgaatgtgagcaggcgctggctgctgagcccaaggccaaggaccccttcgctcacctgcccaagagtacctttgtgttggatgaatttaagcgcaagtactccaatgaggacacactctctgtggcactgccatatttctgggagcactttgataaggacggctggtccctgtggtactcagagtatcgcttccctgaagaactcactcagaccttcatgagctgcaatctcatcactggaatgttccagcgactggacaagctgaggaagaatgccttcgccagtgtcatcctttttggaaccaacaatagcagctccatttctggagtctgggtcttccgaggccaggagcttgcctttccgctgagtccagattggcaggtggactacgagtcatacacatggcggaaactggatcctggcagcgagganacccanacgctggttcgagagtacttttcctgggagggggccttccagcatgtgggcaaagccttcaatcagggcaagatcttcaagtgaacatctcttgccatcacctanctgcctgcncctgccccttnagggaaatgggggtcnttaaaggnaaactgaactttgnnaannnnnnnnnnnnnnnnnnnnnnnnnnnnnnnnnnnnnnnnnnaaangggngccccccccnnanggggncnantaanctnanttannnaanntngannccngnnnaananncnnnnnngncccnnaaancccnnnggnattttttnaaancccnnnntgnccccnggnttttttttggggnaaaancnnnnnnntngnnnantttttngnnnnnnnnnnnnnnnggnnaaaaaannnntn

SEQ ID NO: 451 - DNA, 1538 bp, Homo Sapiens
  misc_feature (2)..(2): n is a, c, g, or t
  misc_feature (166)..(166): n is a, c, g, or t
  misc_feature (181)..(181): n is a, c, g, or t
  misc_feature (187)..(187): n is a, c, g, or t
  misc_feature (204)..(204): n is a, c, g, or t
  misc_feature (208)..(208): n is a, c, g, or t
  misc_feature (211)..(211): n is a, c, g, or t
  misc_feature (213)..(213): n is a, c, g, or t
  misc_feature (220)..(220): n is a, c, g, or t
  misc_feature (228)..(230): n is a, c, g, or t
  misc_feature (246)..(246): n is a, c, g, or t
  misc_feature (251)..(252): n is a, c, g, or t
  misc_feature (255)..(255): n is a, c, g, or t
  misc_feature (259)..(260): n is a, c, g, or t
  misc_feature (266)..(266): n is a, c, g, or t
  misc_feature (276)..(276): n is a, c, g, or t
  misc_feature (282)..(282): n is a, c, g, or t
  misc_feature (287)..(287): n is a, c, g, or t
  misc_feature (292)..(292): n is a, c, g, or t
  misc_feature (297)..(299): n is a, c, g, or t
  misc_feature (301)..(301): n is a, c, g, or t
  misc_feature (307)..(307): n is a, c, g, or t
  misc_feature (316)..(316): n is a, c, g, or t
  misc_feature (318)..(318): n is a, c, g, or t
  misc_feature (321)..(321): n is a, c, g, or t
  misc_feature (323)..(323): n is a, c, g, or t
  misc_feature (325)..(325): n is a, c, g, or t
  misc_feature (327)..(327): n is a, c, g, or t
  misc_feature (329)..(329): n is a, c, g, or t
  misc_feature (332)..(332): n is a, c, g, or t
  misc_feature (338)..(338): n is a, c, g, or t
  misc_feature (346)..(346): n is a, c, g, or t
  misc_feature (353)..(353): n is a, c, g, or t
  misc_feature (356)..(356): n is a, c, g, or t
  misc_feature (359)..(359): n is a, c, g, or t
  misc_feature (366)..(367): n is a, c, g, or t
  misc_feature (373)..(373): n is a, c, g, or t
  misc_feature (377)..(377): n is a, c, g, or t
  misc_feature (381)..(381): n is a, c, g, or t
  misc_feature (383)..(383): n is a, c, g, or t
  misc_feature (385)..(386): n is a, c, g, or t
  misc_feature (389)..(390): n is a, c, g, or t
  misc_feature (392)..(392): n is a, c, g, or t
  misc_feature (398)..(398): n is a, c, g, or t
  misc_feature (404)..(404): n is a, c, g, or t
  misc_feature (406)..(406): n is a, c, g, or t
  misc_feature (408)..(410): n is a, c, g, or t
  misc_feature (413)..(413): n is a, c, g, or t
  misc_feature (417)..(417): n is a, c, g, or t
  misc_feature (420)..(420): n is a, c, g, or t
  misc_feature (429)..(429): n is a, c, g, or t
  misc_feature (438)..(438): n is a, c, g, or t
  misc_feature (444)..(445): n is a, c, g, or t
  misc_feature (447)..(447): n is a, c, g, or t
  misc_feature (450)..(450): n is a, c, g, or t
  misc_feature (453)..(453): n is a, c, g, or t
  misc_feature (458)..(458): n is a, c, g, or t
  misc_feature (462)..(464): n is a, c, g, or t
  misc_feature (466)..(467): n is a, c, g, or t
  misc_feature (470)..(470): n is a, c, g, or t
  misc_feature (472)..(474): n is a, c, g, or t
  misc_feature (479)..(480): n is a, c, g, or t
  misc_feature (483)..(483): n is a, c, g, or t
  misc_feature (487)..(488): n is a, c, g, or t
  misc_feature (492)..(492): n is a, c, g, or t
  misc_feature (501)..(501): n is a, c, g, or t
  misc_feature (512)..(512): n is a, c, g, or t
  misc_feature (515)..(515): n is a, c, g, or t
  misc_feature (518)..(518): n is a, c, g, or t
  misc_feature (522)..(523): n is a, c, g, or t
  misc_feature (525)..(526): n is a, c, g, or t
  misc_feature (532)..(535): n is a, c, g, or t
  misc_feature (538)..(538): n is a, c, g, or t
  misc_feature (542)..(542): n is a, c, g, or t
  misc_feature (548)..(549): n is a, c, g, or t
  misc_feature (552)..(555): n is a, c, g, or t
  misc_feature (557)..(559): n is a, c, g, or t
  misc_feature (561)..(562): n is a, c, g, or t
  misc_feature (569)..(569): n is a, c, g, or t
  misc_feature (574)..(574): n is a, c, g, or t
  misc_feature (577)..(577): n is a, c, g, or t
  misc_feature (580)..(580): n is a, c, g, or t
  misc_feature (584)..(584): n is a, c, g, or t
  misc_feature (589)..(590): n is a, c, g, or t
  misc_feature (593)..(593): n is a, c, g, or t
  misc_feature (596)..(596): n is a, c, g, or t
  misc_feature (600)..(600): n is a, c, g, or t
  misc_feature (614)..(614): n is a, c, g, or t
  misc_feature (623)..(623): n is a, c, g, or t
  misc_feature (625)..(626): n is a, c, g, or t
  misc_feature (630)..(630): n is a, c, g, or t
  misc_feature (639)..(641): n is a, c, g, or t
  misc_feature (644)..(644): n is a, c, g, or t
  misc_feature (653)..(653): n is a, c, g, or t
  misc_feature (658)..(658): n is a, c, g, or t
  misc_feature (662)..(662): n is a, c, g, or t
  misc_feature (666)..(666): n is a, c, g, or t
  misc_feature (671)..(671): n is a, c, g, or t
  misc_feature (674)..(675): n is a, c, g, or t
  misc_feature (683)..(685): n is a, c, g, or t
  misc_feature (702)..(702): n is a, c, g, or t
  misc_feature (709)..(710): n is a, c, g, or t
  misc_feature (717)..(717): n is a, c, g, or t
  misc_feature (719)..(720): n is a, c, g, or t
  misc_feature (726)..(726): n is a, c, g, or t
  misc_feature (728)..(728): n is a, c, g, or t
  misc_feature (732)..(732): n is a, c, g, or t
  misc_feature (734)..(736): n is a, c, g, or t
  misc_feature (740)..(740): n is a, c, g, or t
  misc_feature (743)..(743): n is a, c, g, or t
  misc_feature (754)..(754): n is a, c, g, or t
  misc_feature (757)..(757): n is a, c, g, or t
  misc_feature (759)..(760): n is a, c, g, or t
  misc_feature (765)..(765): n is a, c, g, or t
  misc_feature (767)..(770): n is a, c, g, or t
  misc_feature (774)..(774): n is a, c, g, or t
  misc_feature (781)..(781): n is a, c, g, or t
  misc_feature (789)..(789): n is a, c, g, or t
  misc_feature (797)..(797): n is a, c, g, or t
  misc_feature (801)..(801): n is a, c, g, or t
  misc_feature (803)..(803): n is a, c, g, or t
  misc_feature (806)..(806): n is a, c, g, or t
  misc_feature (811)..(811): n is a, c, g, or t
  misc_feature (814)..(814): n is a, c, g, or t
  misc_feature (817)..(818): n is a, c, g, or t
  misc_feature (822)..(822): n is a, c, g, or t
  misc_feature (826)..(827): n is a, c, g, or t
  misc_feature (833)..(833): n is a, c, g, or t
  misc_feature (838)..(838): n is a, c, g, or t
  misc_feature (842)..(842): n is a, c, g, or t
  misc_feature (849)..(849): n is a, c, g, or t
  misc_feature (852)..(852): n is a, c, g, or t
  misc_feature (854)..(855): n is a, c, g, or t
  misc_feature (857)..(857): n is a, c, g, or t
  misc_feature (865)..(866): n is a, c, g, or t
  misc_feature (881)..(881): n is a, c, g, or t
  misc_feature (886)..(886): n is a, c, g, or t
  misc_feature (890)..(890): n is a, c, g, or t
  misc_feature (892)..(892): n is a, c, g, or t
  misc_feature (895)..(896): n is a, c, g, or t
  misc_feature (898)..(899): n is a, c, g, or t
  misc_feature (902)..(902): n is a, c, g, or t
  misc_feature (904)..(904): n is a, c, g, or t
  misc_feature (907)..(907): n is a, c, g, or t
  misc_feature (913)..(913): n is a, c, g, or t
  misc_feature (916)..(917): n is a, c, g, or t
  misc_feature (919)..(919): n is a, c, g, or t
  misc_feature (927)..(927): n is a, c, g, or t
  misc_feature (930)..(930): n is a, c, g, or t
  misc_feature (933)..(934): n is a, c, g, or t
  misc_feature (938)..(940): n is a, c, g, or t
  misc_feature (942)..(942): n is a, c, g, or t
  misc_feature (944)..(945): n is a, c, g, or t
  misc_feature (947)..(948): n is a, c, g, or t
  misc_feature (950)..(950): n is a, c, g, or t
  misc_feature (953)..(953): n is a, c, g, or t
  misc_feature (956)..(956): n is a, c, g, or t
  misc_feature (959)..(959): n is a, c, g, or t
  misc_feature (962)..(962): n is a, c, g, or t
  misc_feature (965)..(966): n is a, c, g, or t
  misc_feature (968)..(968): n is a, c, g, or t
  misc_feature (972)..(972): n is a, c, g, or t
  misc_feature (974)..(974): n is a, c, g, or t
  misc_feature (983)..(983): n is a, c, g, or t
  misc_feature (989)..(989): n is a, c, g, or t
  misc_feature (993)..(993): n is a, c, g, or t
  misc_feature (996)..(996): n is a, c, g, or t
  misc_feature (1004)..(1005): n is a, c, g, or t
  misc_feature (1007)..(1007): n is a, c, g, or t
  misc_feature (1012)..(1012): n is a, c, g, or t
  misc_feature (1015)..(1015): n is a, c, g, or t
  misc_feature (1029)..(1029): n is a, c, g, or t
  misc_feature (1034)..(1034): n is a, c, g, or t
  misc_feature (1041)..(1041): n is a, c, g, or t
  misc_feature (1051)..(1051): n is a, c, g, or t
  misc_feature (1055)..(1055): n is a, c, g, or t
  misc_feature (1062)..(1064): n is a, c, g, or t
  misc_feature (1068)..(1068): n is a, c, g, or t
  misc_feature (1070)..(1070): n is a, c, g, or t
  misc_feature (1075)..(1076): n is a, c, g, or t
  misc_feature (1082)..(1082): n is a, c, g, or t
  misc_feature (1086)..(1086): n is a, c, g, or t
  misc_feature (1098)..(1099): n is a, c, g, or t
  misc_feature (1110)..(1110): n is a, c, g, or t
  misc_feature (1115)..(1117): n is a, c, g, or t
  misc_feature (1124)..(1125): n is a, c, g, or t
  misc_feature (1131)..(1131): n is a, c, g, or t
  misc_feature (1136)..(1137): n is a, c, g, or t
  misc_feature (1139)..(1141): n is a, c, g, or t
  misc_feature (1143)..(1143): n is a, c, g, or t
  misc_feature (1148)..(1148): n is a, c, g, or t
  misc_feature (1157)..(1157): n is a, c, g, or t
  misc_feature (1159)..(1160): n is a, c, g, or t
  misc_feature (1162)..(1163): n is a, c, g, or t
  misc_feature (1165)..(1166): n is a, c, g, or t
  misc_feature (1170)..(1170): n is a, c, g, or t
  misc_feature (1173)..(1173): n is a, c, g, or t
  misc_feature (1176)..(1176): n is a, c, g, or t
  misc_feature (1178)..(1178): n is a, c, g, or t
  misc_feature (1180)..(1180): n is a, c, g, or t
  misc_feature (1183)..(1183): n is a, c, g, or t
  misc_feature (1187)..(1188): n is a, c, g, or t
  misc_feature (1192)..(1195): n is a, c, g, or t
  misc_feature (1198)..(1201): n is a, c, g, or t
  misc_feature (1207)..(1207): n is a, c, g, or t
  misc_feature (1210)..(1210): n is a, c, g, or t
  misc_feature (1215)..(1216): n is a, c, g, or t
  misc_feature (1220)..(1221): n is a, c, g, or t
  misc_feature (1223)..(1223): n is a, c, g, or t
  misc_feature (1227)..(1228): n is a, c, g, or t
  misc_feature (1230)..(1230): n is a, c, g, or t
  misc_feature (1235)..(1235): n is a, c, g, or t
  misc_feature (1237)..(1237): n is a, c, g, or t
  misc_feature (1244)..(1244): n is a, c, g, or t
  misc_feature (1249)..(1249): n is a, c, g, or t
  misc_feature (1251)..(1251): n is a, c, g, or t
  misc_feature (1253)..(1253): n is a, c, g, or t
  misc_feature (1255)..(1255): n is a, c, g, or t
  misc_feature (1258)..(1258): n is a, c, g, or t
  misc_feature (1262)..(1262): n is a, c, g, or t
  misc_feature (1267)..(1268): n is a, c, g, or t
  misc_feature (1270)..(1270): n is a, c, g, or t
  misc_feature (1275)..(1275): n is a, c, g, or t
  misc_feature (1278)..(1278): n is a, c, g, or t
  misc_feature (1284)..(1284): n is a, c, g, or t
  misc_feature (1287)..(1287): n is a, c, g, or t
  misc_feature (1289)..(1290): n is a, c, g, or t
  misc_feature (1296)..(1296): n is a, c, g, or t
  misc_feature (1307)..(1307): n is a, c, g, or t
  misc_feature (1309)..(1309): n is a, c, g, or t
  misc_feature (1311)..(1314): n is a, c, g, or t
  misc_feature (1316)..(1316): n is a, c, g, or t
  misc_feature (1321)..(1321): n is a, c, g, or t
  misc_feature (1325)..(1327): n is a, c, g, or t
  misc_feature (1343)..(1343): n is a, c, g, or t
  misc_feature (1350)..(1351): n is a, c, g, or t
  misc_feature (1353)..(1354): n is a, c, g, or t
  misc_feature (1362)..(1363): n is a, c, g, or t
  misc_feature (1365)..(1365): n is a, c, g, or t
  misc_feature (1370)..(1371): n is a, c, g, or t
  misc_feature (1385)..(1385): n is a, c, g, or t
  misc_feature (1387)..(1387): n is a, c, g, or t
  misc_feature (1389)..(1389): n is a, c, g, or t
  misc_feature (1396)..(1397): n is a, c, g, or t
  misc_feature (1401)..(1401): n is a, c, g, or t
  misc_feature (1408)..(1409): n is a, c, g, or t
  misc_feature (1411)..(1415): n is a, c, g, or t
  misc_feature (1417)..(1417): n is a, c, g, or t
  misc_feature (1421)..(1421): n is a, c, g, or t
  misc_feature (1429)..(1429): n is a, c, g, or t
  misc_feature (1434)..(1434): n is a, c, g, or t
  misc_feature (1439)..(1440): n is a, c, g, or t
  misc_feature (1445)..(1445): n is a, c, g, or t
  misc_feature (1447)..(1448): n is a, c, g, or t
  misc_feature (1451)..(1451): n is a, c, g, or t
  misc_feature (1453)..(1454): n is a, c, g, or t
  misc_feature (1456)..(1456): n is a, c, g, or t
  misc_feature (1459)..(1460): n is a, c, g, or t
  misc_feature (1462)..(1462): n is a, c, g, or t
  misc_feature (1469)..(1470): n is a, c, g, or t
  misc_feature (1473)..(1474): n is a, c, g, or t
  misc_feature (1476)..(1476): n is a, c, g, or t
  misc_feature (1480)..(1480): n is a, c, g, or t
  misc_feature (1483)..(1483): n is a, c, g, or t
  misc_feature (1493)..(1493): n is a, c, g, or t
  misc_feature (1495)..(1495): n is a, c, g, or t
  misc_feature (1498)..(1498): n is a, c, g, or t
  misc_feature (1505)..(1505): n is a, c, g, or t
  misc_feature (1511)..(1511): n is a, c, g, or t
  misc_feature (1513)..(1514): n is a, c, g, or t
  misc_feature (1517)..(1517): n is a, c, g, or t
  misc_feature (1519)..(1519): n is a, c, g, or t
  misc_feature (1521)..(1521): n is a, c, g, or t
  misc_feature (1526)..(1527): n is a, c, g, or t
  misc_feature (1531)..(1533): n is a, c, g, or t
  misc_feature (1537)..(1537): n is a, c, g, or t
antagagagattactatgagaggatcgcatcaccatcaccatcacgggatcctatttaggtgacactatagaatcgtcgacccacgcgtccggtcgccatgttgtcggtagcagcccgctcgggcccgttcgcgcccgtcctgtcggccacgtcccgcggggtggngggcgcgctgcggcncttggngcaggccacggtgcccncaancangngggatgnggaagttnnnttattgataacaatcnttatnntanattnnatttancaactaattnaggaanaatgntgcanaattnnnangaatanatgacccantntangntnanancancaacanaaaccaancggtganaanagnatttatnntaaaantaanaatnantnnagnnanaaaaantgaatnanannntanaaanaanaaaaacganaataatatnataaanntnaanatntttanatannnannaanannntattnnaantcannatanatatgtaanataaaattttnttnttnattnnannaaaaannnnttnaaanaatatnnaannnntnnntnnataattntaatnaanttnatanaacannaanaantctnaatttaataaaaantaaaataanannatanctataaaannnttnaaattaaanattantgtnaaanaatcnttnnaaaaattnnntaaaatatctaaattcntattttnnaaactanannaaaatnantttncnnntatnatnattaattaatnatntnnattanannnnatanattaaantaaatttntatattanaaantntantaaanatnatnnaaanatannattatnttctntttnaattcanaananntntaaactannatatttaatatttanatttnatcntnatnnannaantnatntatttnttnntnataaaaanttnaanntaannnananntnnanttnaanttnttnaannanatananaaaaatttnaaatantttntantaaatatnntnttttnctnattaaataaaatantttantataaanttattttttnattnctaattnnntaananaaaannaatatntaanaatattatttanntatattatatnttttnnntttaaanntaatanttttnntnnntntattnattaatttncnnanntnnaatnatnatnananaanaatnntatnnnnttnnnnactttnttnttttnnaatnntnaaannanttaancntatttanatatntncntnaanatanaaaannantaaantanatacanatnannttaatntattttcttananannnnantaatnattnnncttttaaaatttatanttaatannannattttatnnanttaannatctttaattaatnantntaaattnntaantcatatnnannnnnantaantaattatnataanttatnntatantnnaantnntnaanntnatttaannaannanttantanatttaactananaanaaaatanatttanannaantnanccaanntaannntaana

SEQ ID NO: 452 - DNA, 1431 bp, Homo Sapiens
  misc_feature (2)..(2): n is a, c, g, or t
  misc_feature (15)..(15): n is a, c, g, or t
  misc_feature (18)..(18): n is a, c, g, or t
  misc_feature (34)..(34): n is a, c, g, or t
  misc_feature (37)..(37): n is a, c, g, or t
  misc_feature (43)..(43): n is a, c, g, or t
  misc_feature (52)..(52): n is a, c, g, or t
  misc_feature (59)..(59): n is a, c, g, or t
  misc_feature (66)..(66): n is a, c, g, or t
  misc_feature (69)..(69): n is a, c, g, or t
  misc_feature (80)..(80): n is a, c, g, or t
  misc_feature (85)..(85): n is a, c, g, or t
  misc_feature (121)..(121): n is a, c, g, or t
  misc_feature (134)..(134): n is a, c, g, or t
  misc_feature (813)..(813): n is a, c, g, or t
  misc_feature (822)..(822): n is a, c, g, or t
  misc_feature (824)..(824): n is a, c, g, or t
  misc_feature (899)..(899): n is a, c, g, or t
  misc_feature (901)..(902): n is a, c, g, or t
  misc_feature (904)..(904): n is a, c, g, or t
  misc_feature (920)..(920): n is a, c, g, or t
  misc_feature (942)..(942): n is a, c, g, or t
  misc_feature (970)..(970): n is a, c, g, or t
  misc_feature (978)..(978): n is a, c, g, or t
  misc_feature (1005)..(1005): n is a, c, g, or t
  misc_feature (1013)..(1013): n is a, c, g, or t
  misc_feature (1019)..(1019): n is a, c, g, or t
  misc_feature (1021)..(1022): n is a, c, g, or t
  misc_feature (1029)..(1029): n is a, c, g, or t
  misc_feature (1037)..(1037): n is a, c, g, or t
  misc_feature (1040)..(1041): n is a, c, g, or t
  misc_feature (1052)..(1052): n is a, c, g, or t
  misc_feature (1059)..(1059): n is a, c, g, or t
  misc_feature (1062)..(1062): n is a, c, g, or t
  misc_feature (1064)..(1064): n is a, c, g, or t
  misc_feature (1070)..(1070): n is a, c, g, or t
  misc_feature (1075)..(1075): n is a, c, g, or t
  misc_feature (1077)..(1077): n is a, c, g, or t
  misc_feature (1081)..(1082): n is a, c, g, or t
  misc_feature (1095)..(1095): n is a, c, g, or t
  misc_feature (1102)..(1104): n is a, c, g, or t
  misc_feature (1106)..(1106): n is a, c, g, or t
  misc_feature (1108)..(1109): n is a, c, g, or t
  misc_feature (1118)..(1118): n is a, c, g, or t
  misc_feature (1120)..(1120): n is a, c, g, or t
  misc_feature (1123)..(1123): n is a, c, g, or t
  misc_feature (1125)..(1126): n is a, c, g, or t
  misc_feature (1128)..(1129): n is a, c, g, or t
  misc_feature (1134)..(1135): n is a, c, g, or t
  misc_feature (1141)..(1141): n is a, c, g, or t
  misc_feature (1152)..(1152): n is a, c, g, or t
  misc_feature (1157)..(1157): n is a, c, g, or t
  misc_feature (1168)..(1168): n is a, c, g, or t
  misc_feature (1172)..(1172): n is a, c, g, or t
  misc_feature (1186)..(1186): n is a, c, g, or t
  misc_feature (1196)..(1196): n is a, c, g, or t
  misc_feature (1202)..(1202): n is a, c, g, or t
  misc_feature (1205)..(1205): n is a, c, g, or t
  misc_feature (1208)..(1211): n is a, c, g, or t
  misc_feature (1216)..(1216): n is a, c, g, or t
  misc_feature (1219)..(1220): n is a, c, g, or t
  misc_feature (1226)..(1226): n is a, c, g, or t
  misc_feature (1228)..(1228): n is a, c, g, or t
  misc_feature (1232)..(1233): n is a, c, g, or t
  misc_feature (1241)..(1241): n is a, c, g, or t
  misc_feature (1243)..(1252): n is a, c, g, or t
  misc_feature (1254)..(1259): n is a, c, g, or t
  misc_feature (1261)..(1268): n is a, c, g, or t
  misc_feature (1278)..(1278): n is a, c, g, or t
  misc_feature (1283)..(1283): n is a, c, g, or t
  misc_feature (1285)..(1285): n is a, c, g, or t
  misc_feature (1288)..(1289): n is a, c, g, or t
  misc_feature (1291)..(1291): n is a, c, g, or t
  misc_feature (1300)..(1300): n is a, c, g, or t
  misc_feature (1308)..(1308): n is a, c, g, or t
  misc_feature (1311)..(1311): n is a, c, g, or t
  misc_feature (1315)..(1315): n is a, c, g, or t
  misc_feature (1320)..(1320): n is a, c, g, or t
  misc_feature (1322)..(1322): n is a, c, g, or t
  misc_feature (1324)..(1326): n is a, c, g, or t
  misc_feature (1330)..(1330): n is a, c, g, or t
  misc_feature (1333)..(1333): n is a, c, g, or t
  misc_feature (1345)..(1345): n is a, c, g, or t
  misc_feature (1352)..(1354): n is a, c, g, or t
  misc_feature (1360)..(1361): n is a, c, g, or t
  misc_feature (1370)..(1370): n is a, c, g, or t
  misc_feature (1377)..(1377): n is a, c, g, or t
  misc_feature (1386)..(1390): n is a, c, g, or t
  misc_feature (1397)..(1397): n is a, c, g, or t
  misc_feature (1401)..(1401): n is a, c, g, or t
  misc_feature (1403)..(1405): n is a, c, g, or t
  misc_feature (1409)..(1409): n is a, c, g, or t
  misc_feature (1413)..(1414): n is a, c, g, or t
  misc_feature (1416)..(1418): n is a, c, g, or t
  misc_feature (1426)..(1426): n is a, c, g, or t
  misc_feature (1431)..(1431): n is a, c, g, or t
gnatagagagaattnctntgagaggatcgcatcnccntcaccntcacggatnctatttnggtgacnctntagaatcgtcnacccncgcgtccgggaagaactggagaaaaggaaggatganattgaacgagaanttctccgaagggtggaggaagccaaacgcatcatggaaaagcagttgctcgaagaactcgagcgacagagacaagctgagcttgccgcacaaaaagctagagagaggaagctggcgcgtatggcagccgaggagcacactctgcaggacactggacaagacagaggaagaacgtgcaaaacgtgaggagctagagcgaatactggaagagaataaccgaaaaattgcagaagcacaagccaaactggccgaagaacagttgagaattgttgaagaacaaagaaagattcatgaggaaaggatgaaactagaacaagaacgacaacgtcaacaaaaagaagaacaaaaaattatcctgggcaaggggaagtccaggccaaaactgtccttctcattaaaaacccaggattaaattgcaaactctgaactttttacaaagaaaaatggaaaaactttgtatggtagcttcatgttgaagtggttttttgtttttgtttttgtttttttaatttgtaaaatctggaaagttagcttgttctaataggggctatgctctgcaattcccttttttttttttttttccttccactaagtcaaatccttatcagatcattgttgtattctaaggagtgacgtatttttcacctgtttgggattctatattagtggtctgaggaaanagcaaatcncnttgtaaaacttatggatggtctgataaggcttttactgacccccctgactttcaaagttatactctgttttgctncnncntaatgctggttttgcngaactttttgtttttttttaanaatttaaaaaaaaaaaaaaaagtttggngattgctnttgggaaatttcccccggggtttttancgggaccnttggtngnngtttttnttaaaccnctnntcctttggaanactgttngcncntgaagntcccngnaaanngggaaaggaaacntttggtnnncncnnaaaaccaantnatntnnanntcccnnaattgnccccggttccnttttnttttttttccntggnaaaaatccaacccncctttccccnttgggnaanaannnnttttnccnnaaaaananaacnntttaattncnnnnnnnnnnannnnnntnnnnnnnnaaaggggcgnccccncncanngnggcctttancttttttntgnctgnccccntnannncccnatntccccacccctngtttttnnnaccccnntcccccggnttttttntaaaacctnnnnnattttgntttnannngtanaaanncnnntccccttntcctn

SEQ ID NO: 453 - DNA, 1389 bp, Homo Sapiens
  misc_feature (700)..(700): n is a, c, g, or t
  misc_feature (745)..(745): n is a, c, g, or t
  misc_feature (772)..(772): n is a, c, g, or t
  misc_feature (801)..(801): n is a, c, g, or t
  misc_feature (889)..(889): n is a, c, g, or t
  misc_feature (896)..(896): n is a, c, g, or t
  misc_feature (900)..(900): n is a, c, g, or t
  misc_feature (903)..(903): n is a, c, g, or t
  misc_feature (912)..(913): n is a, c, g, or t
  misc_feature (930)..(930): n is a, c, g, or t
  misc_feature (933)..(933): n is a, c, g, or t
  misc_feature (983)..(983): n is a, c, g, or t
  misc_feature (987)..(987): n is a, c, g, or t
  misc_feature (994)..(994): n is a, c, g, or t
  misc_feature (1000)..(1000): n is a, c, g, or t
  misc_feature (1004)..(1004): n is a, c, g, or t
  misc_feature (1011)..(1011): n is a, c, g, or t
  misc_feature (1014)..(1015): n is a, c, g, or t
  misc_feature (1019)..(1019): n is a, c, g, or t
  misc_feature (1030)..(1030): n is a, c, g, or t
  misc_feature (1042)..(1042): n is a, c, g, or t
  misc_feature (1063)..(1065): n is a, c, g, or t
  misc_feature (1069)..(1069): n is a, c, g, or t
  misc_feature (1076)..(1077): n is a, c, g, or t
  misc_feature (1091)..(1091): n is a, c, g, or t
  misc_feature (1096)..(1096): n is a, c, g, or t
  misc_feature (1099)..(1099): n is a, c, g, or t
  misc_feature (1108)..(1108): n is a, c, g, or t
  misc_feature (1118)..(1118): n is a, c, g, or t
  misc_feature (1130)..(1130): n is a, c, g, or t
  misc_feature (1138)..(1138): n is a, c, g, or t
  misc_feature (1141)..(1142): n is a, c, g, or t
  misc_feature (1146)..(1146): n is a, c, g, or t
  misc_feature (1148)..(1148): n is a, c, g, or t
  misc_feature (1150)..(1150): n is a, c, g, or t
  misc_feature (1152)..(1153): n is a, c, g, or t
  misc_feature (1156)..(1156): n is a, c, g, or t
  misc_feature (1158)..(1158): n is a, c, g, or t
  misc_feature (1162)..(1162): n is a, c, g, or t
  misc_feature (1164)..(1164): n is a, c, g, or t
  misc_feature (1166)..(1166): n is a, c, g, or t
  misc_feature (1172)..(1172): n is a, c, g, or t
  misc_feature (1178)..(1178): n is a, c, g, or t
  misc_feature (1183)..(1183): n is a, c, g, or t
  misc_feature (1185)..(1186): n is a, c, g, or t
  misc_feature (1188)..(1188): n is a, c, g, or t
  misc_feature (1190)..(1190): n is a, c, g, or t
  misc_feature (1197)..(1197): n is a, c, g, or t
  misc_feature (1217)..(1217): n is a, c, g, or t
  misc_feature (1220)..(1220): n is a, c, g, or t
  misc_feature (1225)..(1227): n is a, c, g, or t
  misc_feature (1229)..(1229): n is a, c, g, or t
  misc_feature (1236)..(1236): n is a, c, g, or t
  misc_feature (1239)..(1242): n is a, c, g, or t
  misc_feature (1250)..(1251): n is a, c, g, or t
  misc_feature (1253)..(1253): n is a, c, g, or t
  misc_feature (1255)..(1255): n is a, c, g, or t
  misc_feature (1265)..(1265): n is a, c, g, or t
  misc_feature (1273)..(1273): n is a, c, g, or t
  misc_feature (1280)..(1280): n is a, c, g, or t
  misc_feature (1283)..(1284): n is a, c, g, or t
  misc_feature (1286)..(1287): n is a, c, g, or t
  misc_feature (1295)..(1297): n is a, c, g, or t
  misc_feature (1301)..(1301): n is a, c, g, or t
  misc_feature (1306)..(1306): n is a, c, g, or t
  misc_feature (1309)..(1310): n is a, c, g, or t
  misc_feature (1314)..(1314): n is a, c, g, or t
  misc_feature (1317)..(1317): n is a, c, g, or t
  misc_feature (1321)..(1321): n is a, c, g, or t
  misc_feature (1325)..(1326): n is a, c, g, or t
  misc_feature (1331)..(1331): n is a, c, g, or t
  misc_feature (1334)..(1334): n is a, c, g, or t
  misc_feature (1336)..(1336): n is a, c, g, or t
  misc_feature (1344)..(1344): n is a, c, g, or t
  misc_feature (1346)..(1347): n is a, c, g, or t
  misc_feature (1359)..(1359): n is a, c, g, or t
  misc_feature (1362)..(1363): n is a, c, g, or t
  misc_feature (1370)..(1370): n is a, c, g, or t
  misc_feature (1373)..(1378): n is a, c, g, or t
  misc_feature (1386)..(1388): n is a, c, g, or t
aattagagagaattactatgagaggatcgcatcaccatcaccatcacggatcctatttaggtgacactatagaatcgtcgacccacgcgtccgcccacagctgccccagagtcctctacatccttcccgcctgcccccacctcaggcatgtcccatcccccacctgccgccagagaggacaagagcccatcagaggaatccgcccccacgacgtccccagagtctgtgtcaggctctgttccctcttcaggtagcagcgggcgagaggaagacgcggcctccacgctagtgacgggctctgagtatgagacgatgctgacggagatcatgtccatgggctatgagcgagagcgggtcgtggccgccctgagagccagctacaacaacccccaccgagccgtggagtatctgctcacgggaattcctgggagccccgagccggaacacggttctgtccaggagagccaggtatcggagcagccggccacggaagcaggagagaaccccctggagttcctgcgggaccagccccagttccagaacatgcggcaggtgattcagcagaaccctgcgctgctgcccgccctgctccagcagctgggccaggagaaccctcagcttttacagcaaatcagccggcaccaggagcagttcatccagatgctgaacgagccccctggggagctggcggacatctcanatgtggagggggaggtgggcgccataggagaggaggccccgcaanatgaactacatccaggtgacgccgcangagaaaagaaagctatagagaggttgaangccctgggcttcccagagagcctggtcatccaggcctattttcgcgtgtgaaaaaaaaatgaaaaaacttggcttgcccaacttcctncttgaantcanaantttgatgannaagtgatgccaggaaancangccaccgaaaccccccaccctaccctttttttccatgaaaagtttttttnaaanaaaaaantatatntttnttcatgnttnntttnaaaaaatgggnaaaaaaaaattnaaaaatttttaaaaaaaaaannnaaangttcaanntttctgttcctctnaaagnggnccctggttnccattttccnggggcaaaaagntttttccnccnntttntncntnnccnantcanantntgttanaaaaanttggnannantnggaaggnaaaaaagggccccttttggnctntgttnnnanttttttntannnnaaaaaaanngngnttttttcttntcttttcnaaaaaanccnnannaccccccnnntttntttanaanngggnaangggncccnnttttnttntnttgggggncnnattttttttttnagnnattttanaannnnnncttctatnnng

SEQ ID NO: 454 - DNA, 1399 bp, Homo Sapiens
  misc_feature (1)..(1): n is a, c, g, or t
  misc_feature (4)..(4): n is a, c, g, or t
  misc_feature (822)..(822): n is a, c, g, or t
  misc_feature (856)..(856): n is a, c, g, or t
  misc_feature (895)..(895): n is a, c, g, or t
  misc_feature (899)..(899): n is a, c, g, or t
  misc_feature (948)..(948): n is a, c, g, or t
  misc_feature (958)..(958): n is a, c, g, or t
  misc_feature (962)..(962): n is a, c, g, or t
  misc_feature (970)..(970): n is a, c, g, or t
  misc_feature (983)..(983): n is a, c, g, or t
  misc_feature (996)..(996): n is a, c, g, or t
  misc_feature (1000)..(1000): n is a, c, g, or t
  misc_feature (1003)..(1003): n is a, c, g, or t
  misc_feature (1007)..(1008): n is a, c, g, or t
  misc_feature (1010)..(1010): n is a, c, g, or t
  misc_feature (1020)..(1020): n is a, c, g, or t
  misc_feature (1030)..(1030): n is a, c, g, or t
  misc_feature (1038)..(1038): n is a, c, g, or t
  misc_feature (1049)..(1049): n is a, c, g, or t
  misc_feature (1051)..(1051): n is a, c, g, or t
  misc_feature (1059)..(1059): n is a, c, g, or t
  misc_feature (1061)..(1061): n is a, c, g, or t
  misc_feature (1064)..(1064): n is a, c, g, or t
  misc_feature (1072)..(1072): n is a, c, g, or t
  misc_feature (1086)..(1086): n is a, c, g, or t
  misc_feature (1090)..(1090): n is a, c, g, or t
  misc_feature (1096)..(1096): n is a, c, g, or t
  misc_feature (1102)..(1102): n is a, c, g, or t
  misc_feature (1104)..(1105): n is a, c, g, or t
  misc_feature (1108)..(1108): n is a, c, g, or t
  misc_feature (1112)..(1112): n is a, c, g, or t
  misc_feature (1117)..(1117): n is a, c, g, or t
  misc_feature (1119)..(1119): n is a, c, g, or t
  misc_feature (1129)..(1129): n is a, c, g, or t
  misc_feature (1135)..(1135): n is a, c, g, or t
  misc_feature (1142)..(1143): n is a, c, g, or t
  misc_feature (1147)..(1147): n is a, c, g, or t
  misc_feature (1157)..(1157): n is a, c, g, or t
  misc_feature (1161)..(1161): n is a, c, g, or t
  misc_feature (1168)..(1169): n is a, c, g, or t
  misc_feature (1187)..(1188): n is a, c, g, or t
  misc_feature (1200)..(1200): n is a, c, g, or t
  misc_feature (1219)..(1219): n is a, c, g, or t
  misc_feature (1222)..(1222): n is a, c, g, or t
  misc_feature (1225)..(1225): n is a, c, g, or t
  misc_feature (1228)..(1228): n is a, c, g, or t
  misc_feature (1231)..(1231): n is a, c, g, or t
  misc_feature (1233)..(1233): n is a, c, g, or t
  misc_feature (1240)..(1240): n is a, c, g, or t
  misc_feature (1242)..(1242): n is a, c, g, or t
  misc_feature (1244)..(1244): n is a, c, g, or t
  misc_feature (1247)..(1247): n is a, c, g, or t
  misc_feature (1251)..(1251): n is a, c, g, or t
  misc_feature (1254)..(1255): n is a, c, g, or t
  misc_feature (1257)..(1258): n is a, c, g, or t
  misc_feature (1267)..(1269): n is a, c, g, or t
  misc_feature (1273)..(1273): n is a, c, g, or t
  misc_feature (1277)..(1277): n is a, c, g, or t
  misc_feature (1280)..(1280): n is a, c, g, or t
  misc_feature (1285)..(1285): n is a, c, g, or t
  misc_feature (1288)..(1288): n is a, c, g, or t
  misc_feature (1293)..(1293): n is a, c, g, or t
  misc_feature (1302)..(1302): n is a, c, g, or t
  misc_feature (1306)..(1306): n is a, c, g, or t
  misc_feature (1311)..(1311): n is a, c, g, or t
  misc_feature (1324)..(1324): n is a, c, g, or t
  misc_feature (1327)..(1328): n is a, c, g, or t
  misc_feature (1331)..(1331): n is a, c, g, or t
  misc_feature (1340)..(1340): n is a, c, g, or t
  misc_feature (1349)..(1349): n is a, c, g, or t
  misc_feature (1358)..(1360): n is a, c, g, or t
  misc_feature (1368)..(1368): n is a, c, g, or t
  misc_feature (1381)..(1381): n is a, c, g, or t
  misc_feature (1385)..(1385): n is a, c, g, or t
  misc_feature (1387)..(1387): n is a, c, g, or t
  misc_feature (1390)..(1390): n is a, c, g, or t
  misc_feature (1392)..(1392): n is a, c, g, or t
  misc_feature (1395)..(1396): n is a, c, g, or t
  misc_feature (1398)..(1398): n is a, c, g, or t
ngantagagagaattactatgagaggatcgcatcaccatcaccatcacggatcctatttaggtgacactatagaatcgtcgacccacgcgtccggccgaggattcagcagcctcccccttgagccccctcgcttcccgacgttccgttcccccctgcccgccttctcccgccaccgccgccgccgccttccgcaggccgtttccaccgaggaaaaggaatcgtatcgtatgtccgctatccagaacctccactctttcgacccctttgctgatgcaagtaagggtgatgacctgcttcctgctggcactgaggattatatccatataagaattcaacagagaaacggcaggaagacccttactactgtccaagggatcgctgatgattacgataaaaagaaactagtgaaggcgtttaagaaaaagtttgcctgcaatggtactgtaattgagcatccggaatatggagaagtaattcagctacagggtgaccaacgcaagaacatatgccagttcctcgtagagattggactggctaaggacgatcagctgaaggttcatgggttttaagtgcttgtggctcactgaagcttaagtgaggatttccttgcaatgagtagaatttcccttctctcccttgtcacaggtttaaaaacctcacagcttgtataatgtaaccatttggggtccgcttttaacttggactagtgtaactccttcatgcaataaaactgaaaaagagccatgctgtctagtcttgaagtccctcattttaaaacagaggtcaagcaataggcgcctggcagtgtcaaagcctgaaancaagcaataccgtcatgttttcagccaagcccanagccctaaaattacaaacaaactatggccggaaacctcntcanctctccctctgcagagttccctaccctaaaaaatgttaccacctggaanatcctcggtnaatntgaaaagnaaaagaaggggtnaaggccaaaaacnccanctngtannanaaaaaagganctttttgggnggaagaanccccgggggtntnccaacctnantangggggaanaaattcaaaaaggncctnttaccncctaangnnggnaaangaaantntggtttgccnaaaagnctttttnnaccnaaatattccnattnaaggggnngtccaaaattcaaaaggnnggccacctttcnccaaaataaacttttaagnggnaanaantcnantgggtcncncntcngtgnccnntnntaaattggnnntaanaccnccnccccnggncaggnaaaaaaaangggnttggnttttttccccccnttnnggnggggagggntaaaccccntttaaaaannnttttaaanaaaaaaagggccncccnangantnatnntnt

SEQ ID NO: 455 - DNA, 1387 bp, Homo Sapiens
  misc_feature (2)..(2): n is a, c, g, or t
  misc_feature (884)..(884): n is a, c, g, or t
  misc_feature (976)..(976): n is a, c, g, or t
  misc_feature (978)..(978): n is a, c, g, or t
  misc_feature (990)..(990): n is a, c, g, or t
  misc_feature (992)..(992): n is a, c, g, or t
  misc_feature (995)..(995): n is a, c, g, or t
  misc_feature (1022)..(1023): n is a, c, g, or t
  misc_feature (1038)..(1038): n is a, c, g, or t
  misc_feature (1054)..(1055): n is a, c, g, or t
  misc_feature (1059)..(1059): n is a, c, g, or t
  misc_feature (1071)..(1072): n is a, c, g, or t
  misc_feature (1077)..(1077): n is a, c, g, or t
  misc_feature (1079)..(1079): n is a, c, g, or t
  misc_feature (1089)..(1089): n is a, c, g, or t
  misc_feature (1094)..(1094): n is a, c, g, or t
  misc_feature (1107)..(1107): n is a, c, g, or t
  misc_feature (1112)..(1112): n is a, c, g, or t
  misc_feature (1125)..(1125): n is a, c, g, or t
  misc_feature (1130)..(1130): n is a, c, g, or t
  misc_feature (1143)..(1143): n is a, c, g, or t
  misc_feature (1149)..(1149): n is a, c, g, or t
  misc_feature (1153)..(1153): n is a, c, g, or t
  misc_feature (1156)..(1156): n is a, c, g, or t
  misc_feature (1183)..(1183): n is a, c, g, or t
  misc_feature (1191)..(1192): n is a, c, g, or t
  misc_feature (1195)..(1195): n is a, c, g, or t
  misc_feature (1199)..(1200): n is a, c, g, or t
  misc_feature (1214)..(1214): n is a, c, g, or t
  misc_feature (1227)..(1227): n is a, c, g, or t
  misc_feature (1239)..(1239): n is a, c, g, or t
  misc_feature (1252)..(1252): n is a, c, g, or t
  misc_feature (1266)..(1266): n is a, c, g, or t
  misc_feature (1268)..(1268): n is a, c, g, or t
  misc_feature (1272)..(1272): n is a, c, g, or t
  misc_feature (1275)..(1275): n is a, c, g, or t
  misc_feature (1281)..(1281): n is a, c, g, or t
  misc_feature (1283)..(1283): n is a, c, g, or t
  misc_feature (1314)..(1314): n is a, c, g, or t
  misc_feature (1318)..(1319): n is a, c, g, or t
  misc_feature (1336)..(1336): n is a, c, g, or t
  misc_feature (1348)..(1348): n is a, c, g, or t
  misc_feature (1350)..(1350): n is a, c, g, or t
  misc_feature (1356)..(1357): n is a, c, g, or t
  misc_feature (1376)..(1376): n is a, c, g, or t
gnattagagagaattactatgagaggatcgcatcaccatcaccatcacggatcctatttaggtgacactatagaatcgtcgacccacgcgtccgcccacgcgtccgcgactgaggaagcacagcctagcactagcacaagtacacaggccccagccgcttcccctactggtgtagttcctggtaccaaatatgcagtacctgacacgtccacttaccagtatgatgaatcttcaggatattactatgatccgacaacagggctctattatgaccccaactcgcaatactactataattccttgacccagcagtacctttactgggatggggaaaaagagacctacgtgccagctgcagagtctagctcccaccagcagtcgggcctgcctcctgcaaaagaggggaaagagaagaaggagaaacccaagagcaaaacagcccagcagattgccaaagacatggaacgctgggctaagagtttgaataagcagaaagaaaactttaaaaatagctttcagcctgtcaattccttgagggaagaagaaaggagagaatctgctgcagcagacgctggctttgctctctttgagaagaagggagccttagctgaaaggcagcagctcatcccagaattggtgcgaaatggagatgaggagaatcccctcaaaaggggtctggttgctgcttacagtggtgacagtgacaatgaggaggagctggtggagagacttgagagtgaggaagagaagctagctgactggaagaagatggcctgtctgctctgccggcgccagttcccgaacaaagatgccctagtcaggcaccagcaactctcagaccttcacaagcaaaacatggacatctaccgacgatccaggctgancgagcaggagctggaagccttggagctaagggaaagagagatgaaatacccgagaccgaactgcaaaaagacgggaaaatacggcattccanancctccaaagccnangcncaaaaaaccagtttgatgcccgccctnnggaattacgagcaancccccccaaagatggnnttgnaccccagtaacnnttggnancaaaatgctnccagnccatggggcctgncgggnaaaggctttgggnttggnaacaaaaggggcnaaggcntttncgnctcccattggaggcccaagttcggctnaagggaannggncctnngaacccaaaggccnccctttggttttnggcgggccccanttcctaaaaaaanttttccgaaaaccngntttnccnggttcntnaaatgggggggaaaaaaaaaaaaaaaaaatntacnnggccccaaaaggggccncccccaattcgntncccccnntttttaggggggccggggngtaaaaaataa

SEQ ID NO: 456 - DNA, 1386 bp, Homo Sapiens
  misc_feature (2)..(7): n is a, c, g, or t
  misc_feature (800)..(800): n is a, c, g, or t
  misc_feature (807)..(807): n is a, c, g, or t
  misc_feature (847)..(847): n is a, c, g, or t
  misc_feature (894)..(894): n is a, c, g, or t
  misc_feature (905)..(905): n is a, c, g, or t
  misc_feature (912)..(912): n is a, c, g, or t
  misc_feature (926)..(926): n is a, c, g, or t
  misc_feature (931)..(932): n is a, c, g, or t
  misc_feature (947)..(947): n is a, c, g, or t
  misc_feature (951)..(951): n is a, c, g, or t
  misc_feature (955)..(956): n is a, c, g, or t
  misc_feature (962)..(962): n is a, c, g, or t
  misc_feature (974)..(974): n is a, c, g, or t
  misc_feature (990)..(991): n is a, c, g, or t
  misc_feature (997)..(997): n is a, c, g, or t
  misc_feature (1009)..(1009): n is a, c, g, or t
  misc_feature (1017)..(1017): n is a, c, g, or t
  misc_feature (1023)..(1023): n is a, c, g, or t
  misc_feature (1031)..(1031): n is a, c, g, or t
  misc_feature (1036)..(1036): n is a, c, g, or t
  misc_feature (1039)..(1039): n is a, c, g, or t
  misc_feature (1041)..(1041): n is a, c, g, or t
  misc_feature (1053)..(1053): n is a, c, g, or t
  misc_feature (1058)..(1059): n is a, c, g, or t
  misc_feature (1081)..(1082): n is a, c, g, or t
  misc_feature (1090)..(1090): n is a, c, g, or t
  misc_feature (1095)..(1095): n is a, c, g, or t
  misc_feature (1101)..(1101): n is a, c, g, or t
  misc_feature (1105)..(1105): n is a, c, g, or t
  misc_feature (1110)..(1110): n is a, c, g, or t
  misc_feature (1113)..(1113): n is a, c, g, or t
  misc_feature (1122)..(1123): n is a, c, g, or t
  misc_feature (1136)..(1136): n is a, c, g, or t
  misc_feature (1144)..(1144): n is a, c, g, or t
  misc_feature (1147)..(1147): n is a, c, g, or t
  misc_feature (1149)..(1149): n is a, c, g, or t
  misc_feature (1158)..(1158): n is a, c, g, or t
  misc_feature (1164)..(1164): n is a, c, g, or t
  misc_feature (1168)..(1168): n is a, c, g, or t
  misc_feature (1173)..(1173): n is a, c, g, or t
  misc_feature (1177)..(1177): n is a, c, g, or t
  misc_feature (1180)..(1181): n is a, c, g, or t
  misc_feature (1186)..(1186): n is a, c, g, or t
  misc_feature (1189)..(1189): n is a, c, g, or t
  misc_feature (1194)..(1194): n is a, c, g, or t
  misc_feature (1205)..(1205): n is a, c, g, or t
  misc_feature (1207)..(1207): n is a, c, g, or t
  misc_feature (1211)..(1213): n is a, c, g, or t
  misc_feature (1216)..(1216): n is a, c, g, or t
  misc_feature (1220)..(1220): n is a, c, g, or t
  misc_feature (1227)..(1227): n is a, c, g, or t
  misc_feature (1229)..(1229): n is a, c, g, or t
  misc_feature (1232)..(1232): n is a, c, g, or t
  misc_feature (1234)..(1234): n is a, c, g, or t
  misc_feature (1241)..(1241): n is a, c, g, or t
  misc_feature (1243)..(1244): n is a, c, g, or t
  misc_feature (1246)..(1247): n is a, c, g, or t
  misc_feature (1251)..(1251): n is a, c, g, or t
  misc_feature (1262)..(1262): n is a, c, g, or t
  misc_feature (1266)..(1267): n is a, c, g, or t
  misc_feature (1269)..(1270): n is a, c, g, or t
  misc_feature (1281)..(1281): n is a, c, g, or t
  misc_feature (1294)..(1294): n is a, c, g, or t
  misc_feature (1298)..(1298): n is a, c, g, or t
  misc_feature (1300)..(1300): n is a, c, g, or t
  misc_feature (1305)..(1305): n is a, c, g, or t
  misc_feature (1307)..(1307): n is a, c, g, or t
  misc_feature (1310)..(1310): n is a, c, g, or t
  misc_feature (1312)..(1312): n is a, c, g, or t
  misc_feature (1315)..(1315): n is a, c, g, or t
  misc_feature (1324)..(1326): n is a, c, g, or t
  misc_feature (1331)..(1334): n is a, c, g, or t
  misc_feature (1336)..(1336): n is a, c, g, or t
  misc_feature (1338)..(1339): n is a, c, g, or t
  misc_feature (1341)..(1342): n is a, c, g, or t
  misc_feature (1344)..(1344): n is a, c, g, or t
  misc_feature (1346)..(1346): n is a, c, g, or t
  misc_feature (1349)..(1351): n is a, c, g, or t
  misc_feature (1364)..(1365): n is a, c, g, or t
  misc_feature (1367)..(1367): n is a, c, g, or t
  misc_feature (1385)..(1385): n is a, c, g, or t
annnnnnaatagagagaattactatgagaggatcgcatcaccatcaccatcacggatcctatttaggtgacactatagaatcgtcgacccacgcgtccgtaaagatggcggcggaggaacctcagcagcagaagcaggagccgctgggcagcgactccgaaggtgttaactgtctggcctatgatgaagccatcatggctcagcaggaccgaattcagcaagagattgctgtgcagaaccctctggtgtcagagcggctggagctctcggtcctatacaaggagtatgctgaagatgacaacatctatcaacagaagatcaaggacctccacaaaaagtactcgtacatccgcaagaccaggcctgacggcaactgtttctatcgggctttcggattctcccacttggaggcactgctggatgacagcaaggagttgcagcggtgagaagggtgggcactgggcaccgaggcaggtgggtgtctacctcctccccgggcgagtaggatgtgtctcgagtagggtgtctccctccttcccgggcgatgggctggactctggccttgccaggcggggcagtgctgtctcggccctggcgtctgggctggtcgaggagcccatgctgggcccgcctttccatcccacccccaggttcaaggctgtgtctgccaagagcaaggaagacctggtgtcccagggcttcactgaattcacaattgaggatttccacaacacgttcatggacctgattgagcaggtggagaagcagacctctgtcgccgacctgctggcctccttcantgaccanagcacctccgactaccttgtggtctacctgcggctgctcncctcggcctacctgcagcgcggagagcaagttcttcgaacactttcntcgaagggtgnacggaantgtcaaggaatttntgccnncaaggaaggtggaancccntgtnncaaagnaaaaccaaccanatcccacttcattggnncctggncccagggccctncaaccgtngtcctntccaaggngaaanaantngaacccccgacnaaggnngggaaacacccaattccgaaanntttcctgnagggntccaancccnaggtnttnccttttctnncggggctggaaanttaaaaantcntntaaaaatangggtgnttcnacccngttnttnncctgntgnccccncttgtaaaggntntaannntanaaanttttttntnggntnaaaaggntnnanntttnccccctttttncttnnannaaacccccccnattttttataaangggngnggggntntananaanaaaaataannnaatannnntnannannananggnnnccccccctagggnncntttaatttatttctacgnt

SEQ ID NO: 457 - DNA, 1339 bp, Homo Sapiens
  misc_feature (816)..(816): n is a, c, g, or t
  misc_feature (834)..(834): n is a, c, g, or t
  misc_feature (905)..(905): n is a, c, g, or t
  misc_feature (931)..(931): n is a, c, g, or t
  misc_feature (936)..(936): n is a, c, g, or t
  misc_feature (945)..(945): n is a, c, g, or t
  misc_feature (957)..(957): n is a, c, g, or t
  misc_feature (960)..(960): n is a, c, g, or t
  misc_feature (971)..(971): n is a, c, g, or t
  misc_feature (975)..(975): n is a, c, g, or t
  misc_feature (1011)..(1011): n is a, c, g, or t
  misc_feature (1052)..(1053): n is a, c, g, or t
  misc_feature (1059)..(1059): n is a, c, g, or t
  misc_feature (1066)..(1066): n is a, c, g, or t
  misc_feature (1069)..(1069): n is a, c, g, or t
  misc_feature (1087)..(1087): n is a, c, g, or t
  misc_feature (1091)..(1091): n is a, c, g, or t
  misc_feature (1093)..(1095): n is a, c, g, or t
  misc_feature (1097)..(1097): n is a, c, g, or t
  misc_feature (1099)..(1099): n is a, c, g, or t
  misc_feature (1106)..(1106): n is a, c, g, or t
  misc_feature (1109)..(1109): n is a, c, g, or t
  misc_feature (1112)..(1112): n is a, c, g, or t
  misc_feature (1117)..(1118): n is a, c, g, or t
  misc_feature (1124)..(1124): n is a, c, g, or t
  misc_feature (1127)..(1127): n is a, c, g, or t
  misc_feature (1129)..(1130): n is a, c, g, or t
  misc_feature (1136)..(1136): n is a, c, g, or t
  misc_feature (1138)..(1139): n is a, c, g, or t
  misc_feature (1145)..(1145): n is a, c, g, or t
  misc_feature (1150)..(1152): n is a, c, g, or t
  misc_feature (1159)..(1161): n is a, c, g, or t
  misc_feature (1167)..(1167): n is a, c, g, or t
  misc_feature (1175)..(1176): n is a, c, g, or t
  misc_feature (1180)..(1180): n is a, c, g, or t
  misc_feature (1182)..(1182): n is a, c, g, or t
  misc_feature (1188)..(1188): n is a, c, g, or t
  misc_feature (1190)..(1190): n is a, c, g, or t
  misc_feature (1192)..(1193): n is a, c, g, or t
  misc_feature (1195)..(1195): n is a, c, g, or t
  misc_feature (1197)..(1197): n is a, c, g, or t
  misc_feature (1202)..(1202): n is a, c, g, or t
  misc_feature (1204)..(1204): n is a, c, g, or t
  misc_feature (1210)..(1210): n is a, c, g, or t
  misc_feature (1213)..(1213): n is a, c, g, or t
  misc_feature (1217)..(1217): n is a, c, g, or t
  misc_feature (1225)..(1226): n is a, c, g, or t
  misc_feature (1228)..(1229): n is a, c, g, or t
  misc_feature (1234)..(1234): n is a, c, g, or t
  misc_feature (1236)..(1236): n is a, c, g, or t
  misc_feature (1245)..(1247): n is a, c, g, or t
  misc_feature (1251)..(1253): n is a, c, g, or t
  misc_feature (1256)..(1256): n is a, c, g, or t
  misc_feature (1258)..(1259): n is a, c, g, or t
  misc_feature (1261)..(1264): n is a, c, g, or t
  misc_feature (1268)..(1268): n is a, c, g, or t
  misc_feature (1279)..(1280): n is a, c, g, or t
  misc_feature (1282)..(1282): n is a, c, g, or t
  misc_feature (1288)..(1290): n is a, c, g, or t
  misc_feature (1300)..(1302): n is a, c, g, or t
  misc_feature (1305)..(1306): n is a, c, g, or t
  misc_feature (1310)..(1313): n is a, c, g, or t
  misc_feature (1316)..(1317): n is a, c, g, or t
  misc_feature (1330)..(1330): n is a, c, g, or t
  misc_feature (1339)..(1339): n is a, c, g, or t
tagagaaattactatgagaggatcgcatcaccatcaccatcacggatcctatttaggtgacactatagaatcgtcgacccacgcgtccgcccacgcgtccgcccacgcgtccggccatcatcaccaaggccagcatcaaggacgtcctggacagcgaagggtacttgctgttctatcacaaacagttcctggaatacgagtagccttatctgcagctggtcagaaaaacaaaggcaatgcattggcaagcctcacaaagtgatcctccctggcccccccctcccccaagtctcccgccgcctccccggcctggtgacaccacctcccatgcagatgtggcccctctgcacctgggacccatcgggtcgggatggaccacacggacggggaggctcctggagctgctttgaagatggatgagatgaggggtgtgctctgggtgggaggagcagcgtacacccgtcaccagaacatctcttgtgtcatgacatgggggtgcaacgggggcctcacagcacagagtgaccgctgcctggcgttccccagcactcggtgtggaaaggcccctacctgctgtaagattatgggtccatgaaagcagtaagctggacacagaggtgtagtgtgcgggacagagggccttgcagatgcctttctgttggtgttttagtgttaaaatacggagagtatggaactcttcacctccattttctcagcggctgtgaagcagcctcctagcttcggaagtacggacactacgtcgcgttttcaagcgtgtctgttctgcaggtaacagcatcaagctgcacgtggaancatctcgcggttttctanaaaacaggcattttcttatccctctcccgctcctttttccacaaaggtgaatttcataaatgtaatactantaaaagtgaatgaattactgagtttnatacngaaatttangtaacttctccnttnaatctcaaaancgantcttgctttttaatgggtgccgttttatgttgctgnccccccctgggtgcctggctcctctgggtgcctttggggtnngctggnggctggnaangggcccaacgaaaaaaantttngnnncnantccaaanggnggnttgtnntccatntgnannaaagcntnnctgccngggtnnnaaggttnnncccccnaatttttnncttnanccatgncngnnancntgccngnaacaanggngttntcccaaanngnnggccntnggggaaccnnntttnnnccncnncnnnnttanttgggaatttnngngggggnnnaaaaaaaccnnnttnntttnnnnaannaaaaaaaaaaaanttttttttn

SEQ ID NO: 458 - DNA, 1535 bp, Homo Sapiens
  misc_feature (1)..(2): n is a, c, g, or t
  misc_feature (4)..(5): n is a, c, g, or t
  misc_feature (7)..(8): n is a, c, g, or t
  misc_feature (12)..(12): n is a, c, g, or t
  misc_feature (23)..(23): n is a, c, g, or t
  misc_feature (25)..(25): n is a, c, g, or t
  misc_feature (45)..(45): n is a, c, g, or t
  misc_feature (51)..(51): n is a, c, g, or t
  misc_feature (74)..(74): n is a, c, g, or t
  misc_feature (373)..(373): n is a, c, g, or t
  misc_feature (400)..(400): n is a, c, g, or t
  misc_feature (413)..(413): n is a, c, g, or t
  misc_feature (423)..(423): n is a, c, g, or t
  misc_feature (440)..(440): n is a, c, g, or t
  misc_feature (447)..(447): n is a, c, g, or t
  misc_feature (513)..(513): n is a, c, g, or t
  misc_feature (565)..(565): n is a, c, g, or t
  misc_feature (602)..(602): n is a, c, g, or t
  misc_feature (608)..(608): n is a, c, g, or t
  misc_feature (614)..(614): n is a, c, g, or t
  misc_feature (658)..(658): n is a, c, g, or t
  misc_feature (669)..(669): n is a, c, g, or t
  misc_feature (677)..(677): n is a, c, g, or t
  misc_feature (684)..(684): n is a, c, g, or t
  misc_feature (686)..(686): n is a, c, g, or t
  misc_feature (699)..(699): n is a, c, g, or t
  misc_feature (710)..(710): n is a, c, g, or t
  misc_feature (722)..(722): n is a, c, g, or t
  misc_feature (738)..(738): n is a, c, g, or t
  misc_feature (752)..(754): n is a, c, g, or t
  misc_feature (763)..(763): n is a, c, g, or t
  misc_feature (769)..(769): n is a, c, g, or t
  misc_feature (778)..(778): n is a, c, g, or t
  misc_feature (786)..(786): n is a, c, g, or t
  misc_feature (789)..(789): n is a, c, g, or t
  misc_feature (792)..(792): n is a, c, g, or t
  misc_feature (808)..(808): n is a, c, g, or t
  misc_feature (811)..(811): n is a, c, g, or t
  misc_feature (815)..(815): n is a, c, g, or t
  misc_feature (817)..(817): n is a, c, g, or t
  misc_feature (821)..(822): n is a, c, g, or t
  misc_feature (833)..(833): n is a, c, g, or t
  misc_feature (837)..(837): n is a, c, g, or t
  misc_feature (839)..(839): n is a, c, g, or t
  misc_feature (841)..(841): n is a, c, g, or t
  misc_feature (843)..(843): n is a, c, g, or t
  misc_feature (850)..(850): n is a, c, g, or t
  misc_feature (852)..(854): n is a, c, g, or t
  misc_feature (856)..(856): n is a, c, g, or t
  misc_feature (859)..(859): n is a, c, g, or t
  misc_feature (862)..(862): n is a, c, g, or t
  misc_feature (868)..(869): n is a, c, g, or t
  misc_feature (875)..(878): n is a, c, g, or t
  misc_feature (885)..(885): n is a, c, g, or t
  misc_feature (888)..(889): n is a, c, g, or t
  misc_feature (892)..(892): n is a, c, g, or t
  misc_feature (895)..(895): n is a, c, g, or t
  misc_feature (897)..(897): n is a, c, g, or t
  misc_feature (900)..(900): n is a, c, g, or t
  misc_feature (903)..(903): n is a, c, g, or t
  misc_feature (909)..(910): n is a, c, g, or t
  misc_feature (916)..(916): n is a, c, g, or t
  misc_feature (923)..(923): n is a, c, g, or t
  misc_feature (928)..(928): n is a, c, g, or t
  misc_feature (934)..(934): n is a, c, g, or t
  misc_feature (938)..(938): n is a, c, g, or t
  misc_feature (946)..(947): n is a, c, g, or t
  misc_feature (949)..(949): n is a, c, g, or t
  misc_feature (951)..(952): n is a, c, g, or t
  misc_feature (954)..(954): n is a, c, g, or t
  misc_feature (960)..(960): n is a, c, g, or t
  misc_feature (966)..(966): n is a, c, g, or t
  misc_feature (979)..(979): n is a, c, g, or t
  misc_feature (987)..(987): n is a, c, g, or t
  misc_feature (992)..(992): n is a, c, g, or t
  misc_feature (997)..(1000): n is a, c, g, or t
  misc_feature (1004)..(1004): n is a, c, g, or t
  misc_feature (1006)..(1006): n is a, c, g, or t
  misc_feature (1009)..(1010): n is a, c, g, or t
  misc_feature (1016)..(1016): n is a, c, g, or t
  misc_feature (1022)..(1022): n is a, c, g, or t
  misc_feature (1032)..(1032): n is a, c, g, or t
  misc_feature (1043)..(1043): n is a, c, g, or t
  misc_feature (1048)..(1048): n is a, c, g, or t
  misc_feature (1052)..(1055): n is a, c, g, or t
  misc_feature (1057)..(1057): n is a, c, g, or t
  misc_feature (1061)..(1061): n is a, c, g, or t
  misc_feature (1063)..(1063): n is a, c, g, or t
  misc_feature (1065)..(1065): n is a, c, g, or t
  misc_feature (1070)..(1070): n is a, c, g, or t
  misc_feature (1076)..(1077): n is a, c, g, or t
  misc_feature (1087)..(1087): n is a, c, g, or t
  misc_feature (1090)..(1090): n is a, c, g, or t
  misc_feature (1093)..(1093): n is a, c, g, or t
  misc_feature (1104)..(1105): n is a, c, g, or t
  misc_feature (1110)..(1111): n is a, c, g, or t
  misc_feature (1114)..(1114): n is a, c, g, or t
  misc_feature (1120)..(1120): n is a, c, g, or t
  misc_feature (1122)..(1123): n is a, c, g, or t
  misc_feature (1126)..(1126): n is a, c, g, or t
  misc_feature (1137)..(1137): n is a, c, g, or t
  misc_feature (1143)..(1143): n is a, c, g, or t
  misc_feature (1148)..(1148): n is a, c, g, or t
  misc_feature (1158)..(1158): n is a, c, g, or t
  misc_feature (1163)..(1163): n is a, c, g, or t
  misc_feature (1165)..(1165): n is a, c, g, or t
  misc_feature (1171)..(1172): n is a, c, g, or t
  misc_feature (1176)..(1177): n is a, c, g, or t
  misc_feature (1180)..(1180): n is a, c, g, or t
  misc_feature (1183)..(1183): n is a, c, g, or t
  misc_feature (1185)..(1188): n is a, c, g, or t
  misc_feature (1202)..(1203): n is a, c, g, or t
  misc_feature (1208)..(1208): n is a, c, g, or t
  misc_feature (1211)..(1213): n is a, c, g, or t
  misc_feature (1216)..(1217): n is a, c, g, or t
  misc_feature (1223)..(1225): n is a, c, g, or t
  misc_feature (1232)..(1232): n is a, c, g, or t
  misc_feature (1234)..(1234): n is a, c, g, or t
  misc_feature (1236)..(1236): n is a, c, g, or t
  misc_feature (1240)..(1242): n is a, c, g, or t
  misc_feature (1245)..(1245): n is a, c, g, or t
  misc_feature (1248)..(1250): n is a, c, g, or t
  misc_feature (1254)..(1254): n is a, c, g, or t
  misc_feature (1260)..(1260): n is a, c, g, or t
  misc_feature (1265)..(1265): n is a, c, g, or t
  misc_feature (1269)..(1269): n is a, c, g, or t
  misc_feature (1274)..(1274): n is a, c, g, or t
  misc_feature (1276)..(1276): n is a, c, g, or t
  misc_feature (1278)..(1278): n is a, c, g, or t
  misc_feature (1282)..(1285): n is a, c, g, or t
  misc_feature (1288)..(1288): n is a, c, g, or t
  misc_feature (1297)..(1297): n is a, c, g, or t
  misc_feature (1299)..(1299): n is a, c, g, or t
  misc_feature (1306)..(1306): n is a, c, g, or t
  misc_feature (1312)..(1312): n is a, c, g, or t
  misc_feature (1314)..(1315): n is a, c, g, or t
  misc_feature (1318)..(1318): n is a, c, g, or t
  misc_feature (1323)..(1323): n is a, c, g, or t
  misc_feature (1328)..(1328): n is a, c, g, or t
  misc_feature (1331)..(1331): n is a, c, g, or t
  misc_feature (1335)..(1337): n is a, c, g, or t
  misc_feature (1339)..(1339): n is a, c, g, or t
  misc_feature (1341)..(1342): n is a, c, g, or t
  misc_feature (1351)..(1351): n is a, c, g, or t
  misc_feature (1355)..(1355): n is a, c, g, or t
  misc_feature (1365)..(1366): n is a, c, g, or t
  misc_feature (1373)..(1373): n is a, c, g, or t
  misc_feature (1375)..(1375): n is a, c, g, or t
  misc_feature (1379)..(1379): n is a, c, g, or t
  misc_feature (1383)..(1383): n is a, c, g, or t
  misc_feature (1385)..(1385): n is a, c, g, or t
  misc_feature (1388)..(1388): n is a, c, g, or t
  misc_feature (1393)..(1394): n is a, c, g, or t
  misc_feature (1418)..(1418): n is a, c, g, or t
  misc_feature (1422)..(1424): n is a, c, g, or t
  misc_feature (1428)..(1428): n is a, c, g, or t
  misc_feature (1430)..(1430): n is a, c, g, or t
  misc_feature (1434)..(1434): n is a, c, g, or t
  misc_feature (1439)..(1439): n is a, c, g, or t
  misc_feature (1445)..(1445): n is a, c, g, or t
  misc_feature (1454)..(1454): n is a, c, g, or t
  misc_feature (1456)..(1457): n is a, c, g, or t
  misc_feature (1464)..(1464): n is a, c, g, or t
  misc_feature (1467)..(1467): n is a, c, g, or t
  misc_feature (1472)..(1472): n is a, c, g, or t
  misc_feature (1476)..(1476): n is a, c, g, or t
  misc_feature (1479)..(1482): n is a, c, g, or t
  misc_feature (1484)..(1485): n is a, c, g, or t
  misc_feature (1495)..(1495): n is a, c, g, or t
  misc_feature (1498)..(1498): n is a, c, g, or t
  misc_feature (1501)..(1501): n is a, c, g, or t
  misc_feature (1511)..(1512): n is a, c, g, or t
  misc_feature (1520)..(1520): n is a, c, g, or t
  misc_feature (1525)..(1525): n is a, c, g, or t
  misc_feature (1529)..(1529): n is a, c, g, or t
  misc_feature (1532)..(1532): n is a, c, g, or t
  misc_feature (1534)..(1534): n is a, c, g, or t
nngnntnngatnaaagagattananatgagaggatcgcatcaccntcaccntcacgggatcctattttggtganactatagaatcgtcgacccacgcgtccggggaggcaaggcgctgtagcttcggggatcccccgaggctgctcggcccggccccacctccgccgtgggtcccggccctacccaccctagctcaggccggcagagccagcgctcgcggatgcggctggtgcgcagtagcgggcctggccagcggctcggggcttgcagggagggcggatctcgggtcggacccgcagccccagacgccgggcttgggggttccccccgccccggcctcctgccagtcactaccacccctagcctctccaantgagctcggcgccgggagaggattaanttttgtacatcangaagaagaanaggctggagaagctacnccaccanctcatgcccatgtacaacttcaaccccacggaagaacaagatgagttggagcatgagctgctggancatgggcgggacgccgcctctgtacaagctgctacttctgtgcaggccatgnatgtcaagactactctgccctccccagggcccactgnagaganccagcnggctggtgtttaccgatgtggccaatgccatcccatgtgtgaanggcactgaganaagcctgnaactttntngataaagacccantcacggttgcntacaagagcatnccccaatcccatgaantgttaaaaaccctnnntctgaaagntcttcnctggccaantacataantantgntttgaacccaaggtanctnagantnttcnnccaaaattccnactngntnanatttaanannntnaanaanaagggnncctaannnnaagcttnggnnttnttnanccnttnaacttnntccctnaactttnaggcncccctntaanaaaagganntncnntnatgtcntaaaangtcaaaaaatctnttgaaagnatttnctcannnncccngnccnnaatccnctaatnttcaaaaggnctattccgtcntaagntaannnnanattnangngaaanacccannttaaaaggtnttngtncaaaaataaanntaaannttnttcatntnntanaaaaaaaaaantttctnttaanatttaaaacnccctncnatagannctcnncanctnannnncttcttaatttttnngtcanaannnacnnatatcnnntttgttntnanactnnnacnatnnntaantataanttacnattnctaanantncaannnntcnacaagaatntnatttctntactgntnnctnacctnacatnaantatnnncnanntaatcatcnccanttcattatannagaaagnanttancacnancanctaannaatttaaaatatattaaacaaatnatgnnnatananaaanctatnccttantaacattananncatactnaantattnacanatnnnntnnaacacttctntantanaattctactnntctcatantatcntatnctntna

SEQ ID NO: 459 - DNA, 1233 bp, Homo Sapiens
  misc_feature (1)..(1): n is a, c, g, or t
  misc_feature (3)..(3): n is a, c, g, or t
  misc_feature (850)..(850): n is a, c, g, or t
  misc_feature (883)..(883): n is a, c, g, or t
  misc_feature (908)..(908): n is a, c, g, or t
  misc_feature (927)..(927): n is a, c, g, or t
  misc_feature (977)..(977): n is a, c, g, or t
  misc_feature (993)..(993): n is a, c, g, or t
  misc_feature (995)..(995): n is a, c, g, or t
  misc_feature (1026)..(1026): n is a, c, g, or t
  misc_feature (1043)..(1043): n is a, c, g, or t
  misc_feature (1053)..(1054): n is a, c, g, or t
  misc_feature (1059)..(1059): n is a, c, g, or t
  misc_feature (1065)..(1065): n is a, c, g, or t
  misc_feature (1074)..(1074): n is a, c, g, or t
  misc_feature (1086)..(1086): n is a, c, g, or t
  misc_feature (1091)..(1091): n is a, c, g, or t
  misc_feature (1093)..(1093): n is a, c, g, or t
  misc_feature (1095)..(1095): n is a, c, g, or t
  misc_feature (1105)..(1105): n is a, c, g, or t
  misc_feature (1107)..(1107): n is a, c, g, or t
  misc_feature (1110)..(1110): n is a, c, g, or t
  misc_feature (1117)..(1117): n is a, c, g, or t
  misc_feature (1119)..(1119): n is a, c, g, or t
  misc_feature (1137)..(1137): n is a, c, g, or t
  misc_feature (1140)..(1140): n is a, c, g, or t
  misc_feature (1152)..(1152): n is a, c, g, or t
  misc_feature (1155)..(1157): n is a, c, g, or t
  misc_feature (1169)..(1169): n is a, c, g, or t
  misc_feature (1172)..(1173): n is a, c, g, or t
  misc_feature (1175)..(1177): n is a, c, g, or t
  misc_feature (1181)..(1182): n is a, c, g, or t
  misc_feature (1186)..(1186): n is a, c, g, or t
  misc_feature (1192)..(1192): n is a, c, g, or t
  misc_feature (1201)..(1203): n is a, c, g, or t
  misc_feature (1208)..(1208): n is a, c, g, or t
  misc_feature (1213)..(1213): n is a, c, g, or t
  misc_feature (1220)..(1220): n is a, c, g, or t
nantagagaaattactatgagaggatcgcatcaccatcaccatcacggatcctatttaggtgacactatagaatcgtcgacccacgcgtccggccgccgccgaggattcagcagcctcccccttgagccccctcgcttcccgacgttccgttcccccctgcccgccttctcccgccaccgccgccgccgccttccgcaggccgtttccaccgaggaaaaggaatcgtatcgtatgtccgctatccagaacctccactctttcgacccctttgctgatgcaagtaagggtgatgacctgcttcctgctggcactgaggattatatccatataagaattcaacagagaaacggcaggaagacccttactactgtccaagggatcgctgatgattacgataaaaagaaactagtgaaggcgtttaagaaaaagtttgcctgcaatggtactgtaattgagcatccggaatatggagaagtaattcagctacagggtgaccaacgcaagaacatatgccagttcctcgtagagattggactggctaaggacgatcagctgaaggttcatgggttttaagtgcttgtggctcactgaagcttaagtgaggatttccttgcaatgagtagaatttcccttctctcccttgtcacaggtttaaaaacctcacagcttgtataatgtaaccatttggggtccgcttttaacttggactagtgtaactccttcatgcaataaactgaaaagagccatgctgtctagtcttgaagtccctcatttaaacagaggtcaagcaataggcgcctggcagtgtcaagcctgaaaccaagcaataccgtcatgtttcagccaagncccagagccctaagattacaaacaactatggcnggaacctcctcagctctccctctgnaaagttcctaccctaaaanaatgttacccctgaacagtcctcggtgaatctgaaaggaaaagatggggntaaggcaaaacccccncntgtactactaaaaagggagcttttggggggnaaatcccctgggggtcnccaacctgannaaggnggaaanaacccaaanaaggccctcttnaccgntngngaggggaaangnaantctgggntngccaaaaaggttttttcnacnaaaaattttccnaannnaaggggggtccnaanntnnnaaanngggnggccanccttttttnnnaaatntaaantttttgnaaagggaaaaaaa

SEQ ID NO: 460 - DNA, 1427 bp, Homo Sapiens
  misc_feature (867)..(869): n is a, c, g, or t
  misc_feature (873)..(874): n is a, c, g, or t
  misc_feature (881)..(881): n is a, c, g, or t
  misc_feature (883)..(883): n is a, c, g, or t
  misc_feature (896)..(896): n is a, c, g, or t
  misc_feature (911)..(911): n is a, c, g, or t
  misc_feature (915)..(915): n is a, c, g, or t
  misc_feature (921)..(921): n is a, c, g, or t
  misc_feature (932)..(932): n is a, c, g, or t
  misc_feature (934)..(934): n is a, c, g, or t
  misc_feature (954)..(954): n is a, c, g, or t
  misc_feature (968)..(968): n is a, c, g, or t
  misc_feature (1004)..(1004): n is a, c, g, or t
  misc_feature (1021)..(1021): n is a, c, g, or t
  misc_feature (1029)..(1029): n is a, c, g, or t
  misc_feature (1040)..(1040): n is a, c, g, or t
  misc_feature (1045)..(1045): n is a, c, g, or t
  misc_feature (1047)..(1047): n is a, c, g, or t
  misc_feature (1062)..(1062): n is a, c, g, or t
  misc_feature (1066)..(1066): n is a, c, g, or t
  misc_feature (1068)..(1068): n is a, c, g, or t
  misc_feature (1070)..(1070): n is a, c, g, or t
  misc_feature (1072)..(1072): n is a, c, g, or t
  misc_feature (1083)..(1083): n is a, c, g, or t
  misc_feature (1094)..(1094): n is a, c, g, or t
  misc_feature (1104)..(1104): n is a, c, g, or t
  misc_feature (1107)..(1107): n is a, c, g, or t
  misc_feature (1111)..(1111): n is a, c, g, or t
  misc_feature (1116)..(1116): n is a, c, g, or t
  misc_feature (1122)..(1122): n is a, c, g, or t
  misc_feature (1127)..(1128): n is a, c, g, or t
  misc_feature (1149)..(1149): n is a, c, g, or t
  misc_feature (1152)..(1152): n is a, c, g, or t
  misc_feature (1154)..(1155): n is a, c, g, or t
  misc_feature (1158)..(1158): n is a, c, g, or t
  misc_feature (1160)..(1160): n is a, c, g, or t
  misc_feature (1162)..(1162): n is a, c, g, or t
  misc_feature (1167)..(1167): n is a, c, g, or t
  misc_feature (1169)..(1169): n is a, c, g, or t
  misc_feature (1178)..(1178): n is a, c, g, or t
  misc_feature (1180)..(1180): n is a, c, g, or t
  misc_feature (1184)..(1184): n is a, c, g, or t
  misc_feature (1187)..(1187): n is a, c, g, or t
  misc_feature (1196)..(1198): n is a, c, g, or t
  misc_feature (1203)..(1203): n is a, c, g, or t
  misc_feature (1213)..(1213): n is a, c, g, or t
  misc_feature (1224)..(1224): n is a, c, g, or t
  misc_feature (1227)..(1227): n is a, c, g, or t
  misc_feature (1237)..(1237): n is a, c, g, or t
  misc_feature (1240)..(1240): n is a, c, g, or t
  misc_feature (1242)..(1242): n is a, c, g, or t
  misc_feature (1245)..(1245): n is a, c, g, or t
  misc_feature (1247)..(1247): n is a, c, g, or t
  misc_feature (1250)..(1250): n is a, c, g, or t
  misc_feature (1252)..(1252): n is a, c, g, or t
  misc_feature (1258)..(1260): n is a, c, g, or t
  misc_feature (1265)..(1266): n is a, c, g, or t
  misc_feature (1268)..(1268): n is a, c, g, or t
  misc_feature (1270)..(1270): n is a, c, g, or t
  misc_feature (1276)..(1276): n is a, c, g, or t
  misc_feature (1278)..(1278): n is a, c, g, or t
  misc_feature (1283)..(1283): n is a, c, g, or t
  misc_feature (1291)..(1291): n is a, c, g, or t
  misc_feature (1293)..(1293): n is a, c, g, or t
  misc_feature (1296)..(1296): n is a, c, g, or t
  misc_feature (1303)..(1303): n is a, c, g, or t
  misc_feature (1305)..(1305): n is a, c, g, or t
  misc_feature (1314)..(1314): n is a, c, g, or t
  misc_feature (1319)..(1321): n is a, c, g, or t
  misc_feature (1323)..(1323): n is a, c, g, or t
  misc_feature (1338)..(1338): n is a, c, g, or t
  misc_feature (1341)..(1341): n is a, c, g, or t
  misc_feature (1346)..(1346): n is a, c, g, or t
  misc_feature (1350)..(1350): n is a, c, g, or t
  misc_feature (1357)..(1357): n is a, c, g, or t
  misc_feature (1360)..(1361): n is a, c, g, or t
  misc_feature (1380)..(1380): n is a, c, g, or t
  misc_feature (1382)..(1382): n is a, c, g, or t
  misc_feature (1407)..(1407): n is a, c, g, or t
  misc_feature (1411)..(1411): n is a, c, g, or t
  misc_feature (1413)..(1413): n is a, c, g, or t
  misc_feature (1419)..(1420): n is a, c, g, or t
tagagaaattactatgagaggatcgcatcaccatcaccatcacggatcctatttaggtgacactatagaatcgtcgacccacgcgtccgcacagccgtctttctctttgcctcagccacttccttccttcgcctcaccctccccagtgcactgaagaaggtaaccgggtccagacccacgcggcgccagttctccggcgggaaggaaaaccgcgcagagaggcagcaatgaatgtggatcacgaggttaacctcttagtggaggaaattcatcgtttgggttcaaaaaatgctgatggaaagttaagcgtgaaatttggggtcctcttccgtgatgataaatgtgccaacctctttgaagcattggtaggaactcttaaagctgcaaaacgaaggaagattgtaacatatccaggagagctgcttctgcaaggtgttcatgatgatgttgacattatattactgcaagattaatgtggtttacatatctttatgtactgccattttttgtttctggtaaactggaatataaagtgaaagaacaaacatttgaacatacttaatgtatttttatagaactttgtaaacgaaaggagattcatgttttagaagtctgtccttttttatatcttgaaagaaaatctatgtatgatgctataaaataaatcctattatttttctcaggaatctggttaggaattgcaggcaatgagattttttgcggggcagggatgggaatgtttgttcataaataattagacattttctatagatatttgacattctgcgaaagcaacaagcaaactgaagaccaactcctatgagaaatattatgatgtttatgtaaaaagacatgtaactgtcttannnaaanncaaaaananaaaaaaaaggggncggccgcctccctanaagngagtcntattaagcttnantaactgaacttggaccccgntgaaaaaatcccgnaatgacctcaaaactcctctggatttttccaaaacnctcggttgcccccgggngttttttnttggggaaaanccaancnacttgggaaattttncggnancnanggacctaaatnggaaaaaaaanccccgggaanccncccnttaanttcccnagggnnccctaaaaaaattttgagggnttncnnccntngncccgngncccctaaancnaacnttncctgggaannnagccnttttaaaacncaaaaaaaaanacnaagttttccngcntnttncnttntncccccnnnaaggnncncngaattntnggaanaaaaggangnggnaagaaantntcccttttnacttnnnanaaaaaaatttttccnggnaaaanaaantcggttntcnnatttaaaagggggggggancncctcccggttaaaaattttcccccncggnanttttannaaaaacc

SEQ ID NO: 461 - DNA, 1299 bp, Homo Sapiens
  misc_feature (1)..(1): n is a, c, g, or t
  misc_feature (871)..(871): n is a, c, g, or t
  misc_feature (894)..(894): n is a, c, g, or t
  misc_feature (908)..(908): n is a, c, g, or t
  misc_feature (927)..(927): n is a, c, g, or t
  misc_feature (938)..(938): n is a, c, g, or t
  misc_feature (941)..(941): n is a, c, g, or t
  misc_feature (948)..(948): n is a, c, g, or t
  misc_feature (961)..(961): n is a, c, g, or t
  misc_feature (974)..(974): n is a, c, g, or t
  misc_feature (983)..(983): n is a, c, g, or t
  misc_feature (991)..(992): n is a, c, g, or t
  misc_feature (995)..(995): n is a, c, g, or t
  misc_feature (1001)..(1001): n is a, c, g, or t
  misc_feature (1003)..(1003): n is a, c, g, or t
  misc_feature (1009)..(1009): n is a, c, g, or t
  misc_feature (1011)..(1011): n is a, c, g, or t
  misc_feature (1021)..(1021): n is a, c, g, or t
  misc_feature (1027)..(1027): n is a, c, g, or t
  misc_feature (1031)..(1031): n is a, c, g, or t
  misc_feature (1035)..(1035): n is a, c, g, or t
  misc_feature (1051)..(1051): n is a, c, g, or t
  misc_feature (1058)..(1059): n is a, c, g, or t
  misc_feature (1063)..(1063): n is a, c, g, or t
  misc_feature (1065)..(1065): n is a, c, g, or t
  misc_feature (1073)..(1073): n is a, c, g, or t
  misc_feature (1075)..(1075): n is a, c, g, or t
  misc_feature (1079)..(1079): n is a, c, g, or t
  misc_feature (1085)..(1085): n is a, c, g, or t
  misc_feature (1087)..(1087): n is a, c, g, or t
  misc_feature (1102)..(1102): n is a, c, g, or t
  misc_feature (1111)..(1111): n is a, c, g, or t
  misc_feature (1113)..(1113): n is a, c, g, or t
  misc_feature (1116)..(1116): n is a, c, g, or t
  misc_feature (1126)..(1126): n is a, c, g, or t
  misc_feature (1135)..(1135): n is a, c, g, or t
  misc_feature (1138)..(1139): n is a, c, g, or t
  misc_feature (1144)..(1144): n is a, c, g, or t
  misc_feature (1146)..(1146): n is a, c, g, or t
  misc_feature (1149)..(1149): n is a, c, g, or t
  misc_feature (1151)..(1153): n is a, c, g, or t
  misc_feature (1161)..(1161): n is a, c, g, or t
  misc_feature (1167)..(1167): n is a, c, g, or t
  misc_feature (1171)..(1171): n is a, c, g, or t
  misc_feature (1173)..(1174): n is a, c, g, or t
  misc_feature (1176)..(1176): n is a, c, g, or t
  misc_feature (1178)..(1178): n is a, c, g, or t
  misc_feature (1180)..(1180): n is a, c, g, or t
  misc_feature (1190)..(1190): n is a, c, g, or t
  misc_feature (1192)..(1192): n is a, c, g, or t
  misc_feature (1197)..(1199): n is a, c, g, or t
  misc_feature (1201)..(1201): n is a, c, g, or t
  misc_feature (1205)..(1205): n is a, c, g, or t
  misc_feature (1207)..(1208): n is a, c, g, or t
  misc_feature (1213)..(1214): n is a, c, g, or t
  misc_feature (1218)..(1222): n is a, c, g, or t
  misc_feature (1224)..(1224): n is a, c, g, or t
  misc_feature (1233)..(1236): n is a, c, g, or t
  misc_feature (1239)..(1239): n is a, c, g, or t
  misc_feature (1241)..(1244): n is a, c, g, or t
  misc_feature (1247)..(1247): n is a, c, g, or t
  misc_feature (1252)..(1260): n is a, c, g, or t
  misc_feature (1264)..(1267): n is a, c, g, or t
  misc_feature (1277)..(1277): n is a, c, g, or t
  misc_feature (1280)..(1285): n is a, c, g, or t
  misc_feature (1287)..(1287): n is a, c, g, or t
  misc_feature (1291)..(1291): n is a, c, g, or t
  misc_feature (1293)..(1294): n is a, c, g, or t
  misc_feature (1296)..(1297): n is a, c, g, or t
  misc_feature (1299)..(1299): n is a, c, g, or t
naattagagaaattactatgagaggatcgcatcaccatcaccatcacggatcctatttaggtgacactatagaatcgtcgacccacgcgtccgcccacgcgtccggtgacgagtcccgcgttctctccttgaatccactcgccagcccgccgccctctgccgccgcaccctgcacacccgcccctctcctgtgccaggaacttgctactaccagcaccatgccctaccaatatccagcactgaccccggagcagaagaaggagctgtctgacatcgctcaccgcatcgtggcacctggcaagggcatcctggctgcagatgagtccactgggagcattgccaagcggctgcagtccattggcaccgagaacaccgaggagaaccggcgcttctaccgccagctgctgctgacagctgacgaccgcgtgaacccctgcattgggggtgtcatcctcttccatgagacactctaccagaaggcggatgatgggcgtcccttcccccaagttatcaaatccaagggcggtgttgtgggcatcaaggtagacaagggcgtggtccccctggcagggacaaatggcgagactaccacccaagggttggatgggctgtctgagcgctgtgcccagtacaagaaggacggagctgacttcgccaagtggcgttgtgtgctgaagattggggaacacaccccctcagccctcgccatcatggaaaatgccaatgttctggcccgttatgccagtatctgccagcagaatggcattgtgcccatcgtggagcctgagatcctccctgatggggaccatgacttgaagcgctgccagtatgtgaccgaaaaggtgctggctgctgtctacaaggctctgantgaccaccacatctacctggaangcaccttgctgaanccaacatggtcacccccangccatgcttgncantcaaaanttttctcatgagnaaattgccatggngaccgtcanagcgctgnnccncaaaangncccccngntgtcactggnatcacnttcntgtntgaaggccaaaatganaagaagnntccntnacctcaangncatnaaaaangncccctggtgaaaccntgggcctgnanttntctaagggcnaacctggangcnntgccntnaangnnngggggggnaaaaanaaancnnangntnccaaaaaaananttaannnancctngnnaaaanntttnnnnnanaaaaaaaannnnaangnnnnggnggggnnnnnnnnnaaannnntttttttttnaannnnnntnaaangnngnntn

SEQ ID NO: 462 - DNA, 1380 bp, Homo Sapiens
  misc_feature (796)..(796): n is a, c, g, or t
  misc_feature (845)..(845): n is a, c, g, or t
  misc_feature (862)..(864): n is a, c, g, or t
  misc_feature (887)..(887): n is a, c, g, or t
  misc_feature (909)..(909): n is a, c, g, or t
  misc_feature (926)..(926): n is a, c, g, or t
  misc_feature (956)..(956): n is a, c, g, or t
  misc_feature (970)..(970): n is a, c, g, or t
  misc_feature (973)..(973): n is a, c, g, or t
  misc_feature (999)..(999): n is a, c, g, or t
  misc_feature (1013)..(1014): n is a, c, g, or t
  misc_feature (1023)..(1023): n is a, c, g, or t
  misc_feature (1025)..(1025): n is a, c, g, or t
  misc_feature (1027)..(1027): n is a, c, g, or t
  misc_feature (1036)..(1036): n is a, c, g, or t
  misc_feature (1046)..(1046): n is a, c, g, or t
  misc_feature (1061)..(1061): n is a, c, g, or t
  misc_feature (1071)..(1072): n is a, c, g, or t
  misc_feature (1080)..(1080): n is a, c, g, or t
  misc_feature (1084)..(1084): n is a, c, g, or t
  misc_feature (1087)..(1088): n is a, c, g, or t
  misc_feature (1096)..(1096): n is a, c, g, or t
  misc_feature (1106)..(1106): n is a, c, g, or t
  misc_feature (1112)..(1114): n is a, c, g, or t
  misc_feature (1117)..(1117): n is a, c, g, or t
  misc_feature (1121)..(1122): n is a, c, g, or t
  misc_feature (1127)..(1128): n is a, c, g, or t
  misc_feature (1132)..(1132): n is a, c, g, or t
  misc_feature (1143)..(1144): n is a, c, g, or t
  misc_feature (1148)..(1148): n is a, c, g, or t
  misc_feature (1160)..(1161): n is a, c, g, or t
  misc_feature (1174)..(1176): n is a, c, g, or t
  misc_feature (1188)..(1188): n is a, c, g, or t
  misc_feature (1190)..(1190): n is a, c, g, or t
  misc_feature (1193)..(1193): n is a, c, g, or t
  misc_feature (1198)..(1198): n is a, c, g, or t
  misc_feature (1201)..(1201): n is a, c, g, or t
  misc_feature (1203)..(1203): n is a, c, g, or t
  misc_feature (1208)..(1208): n is a, c, g, or t
  misc_feature (1210)..(1210): n is a, c, g, or t
  misc_feature (1213)..(1213): n is a, c, g, or t
  misc_feature (1226)..(1226): n is a, c, g, or t
  misc_feature (1231)..(1232): n is a, c, g, or t
  misc_feature (1238)..(1238): n is a, c, g, or t
  misc_feature (1242)..(1242): n is a, c, g, or t
  misc_feature (1248)..(1248): n is a, c, g, or t
  misc_feature (1250)..(1250): n is a, c, g, or t
  misc_feature (1252)..(1252): n is a, c, g, or t
  misc_feature (1261)..(1261): n is a, c, g, or t
  misc_feature (1271)..(1271): n is a, c, g, or t
  misc_feature (1297)..(1297): n is a, c, g, or t
  misc_feature (1305)..(1305): n is a, c, g, or t
  misc_feature (1312)..(1313): n is a, c, g, or t
  misc_feature (1316)..(1316): n is a, c, g, or t
  misc_feature (1319)..(1319): n is a, c, g, or t
  misc_feature (1324)..(1324): n is a, c, g, or t
  misc_feature (1331)..(1335): n is a, c, g, or t
  misc_feature (1340)..(1341): n is a, c, g, or t
  misc_feature (1345)..(1345): n is a, c, g, or t
  misc_feature (1348)..(1349): n is a, c, g, or t
  misc_feature (1359)..(1360): n is a, c, g, or t
  misc_feature (1364)..(1364): n is a, c, g, or t
  misc_feature (1368)..(1368): n is a, c, g, or t
  misc_feature (1373)..(1373): n is a, c, g, or t
  misc_feature (1378)..(1378): n is a, c, g, or t
  misc_feature (1380)..(1380): n is a, c, g, or t
tagagaaaattactatgagaggatcgcatcaccatcaccatcacggatcctatttaggtgacactatagaatcgtcgacccacgcgtccggccgggagttggagcctgcggagttcgagaccatgctgctgttctgccccggctgcgggaacgggctgatcgtggaggagggacaacgctgccaccgcttcgcctgcaacacgtgcccctacgtgcacaacatcacccgcaaggtaacaaatcggaagtacccaaaactgaaagaagtggatgatgtgcttggtggagcagctgcctgggagaatgttgactctactgcagagtcgtgtcccaaatgcgaacatcctcgtgcttacttcatgcagcttcagacccgctctgcagatgagccgatgaccaccttctacaagtgctgcaatgctcagtgtggacaccgctggagggattagggccaggatggcccagctgccctagtgtgtgcttgccttgtccctcggggtagatgcttagctggcagtatgagttgtgtgtcctgagggtctttgctagtgtggtggaaagataaaccttttgaggtgaagagccagggggtcaggaaatatggcctatctgccaggcagggtggatgaagtcatgaatgtctgggagtttttctgtgtggggaggagacagagacccataactaaatatgctctgtgtaaagtcctattctttcatcttccactttattggcagttgacattcccttactcccaatcaacactcttaaatatttgtactgtttgtaaaaacttantacatgtccctaaatatttaaaaaaaaaaaaaaaaaaaaaaaaaaaggncggccgctcccctatannngagtcgtattaagcttaatttanctgaacttggactcctgttganaaaatccagtaatgacntcaaaactccatctggatttgttcaaaacnctcggttgcccccnggngttttttatggggaaaatccaactancttggcaaattttnnggaactaangnanctaaaatgnaaaaaaaaantccctggaaataccnccgtttaaanntcccaatnggcntcnnaaaaaaanttttgaaggnatttcnnncantttnnccaannaacnaaaaacaaacnnttcnctggaatttacnnccttttaaaaacnnnaaaaaaaaaaancnaanttttntcngnctttntncantttttcccccccnaaaanncccccngaanttttangnanaaaaaaagngaacgggaanggaaaaagttcccttttacccttttnaaaaaaanaaaattnntcntgnaaaanaaaattnnnnnttttnnaatnttnnaaaggggttnnaaancccntttcnaggtntn

SEQ ID NO: 463 - DNA, 1506 bp, Homo Sapiens
  misc_feature (1)..(2): n is a, c, g, or t
  misc_feature (190)..(190): n is a, c, g, or t
  misc_feature (255)..(255): n is a, c, g, or t
  misc_feature (280)..(281): n is a, c, g, or t
  misc_feature (290)..(290): n is a, c, g, or t
  misc_feature (304)..(304): n is a, c, g, or t
  misc_feature (370)..(370): n is a, c, g, or t
  misc_feature (373)..(373): n is a, c, g, or t
  misc_feature (382)..(382): n is a, c, g, or t
  misc_feature (391)..(391): n is a, c, g, or t
  misc_feature (393)..(393): n is a, c, g, or t
  misc_feature (405)..(405): n is a, c, g, or t
  misc_feature (411)..(412): n is a, c, g, or t
  misc_feature (414)..(414): n is a, c, g, or t
  misc_feature (430)..(430): n is a, c, g, or t
  misc_feature (432)..(432): n is a, c, g, or t
  misc_feature (436)..(436): n is a, c, g, or t
  misc_feature (441)..(441): n is a, c, g, or t
  misc_feature (461)..(461): n is a, c, g, or t
  misc_feature (470)..(470): n is a, c, g, or t
  misc_feature (474)..(474): n is a, c, g, or t
  misc_feature (477)..(479): n is a, c, g, or t
  misc_feature (489)..(489): n is a, c, g, or t
  misc_feature (503)..(503): n is a, c, g, or t
  misc_feature (507)..(507): n is a, c, g, or t
  misc_feature (512)..(512): n is a, c, g, or t
  misc_feature (517)..(517): n is a, c, g, or t
  misc_feature (523)..(525): n is a, c, g, or t
  misc_feature (531)..(531): n is a, c, g, or t
  misc_feature (535)..(535): n is a, c, g, or t
  misc_feature (538)..(539): n is a, c, g, or t
  misc_feature (545)..(545): n is a, c, g, or t
  misc_feature (548)..(548): n is a, c, g, or t
  misc_feature (554)..(554): n is a, c, g, or t
  misc_feature (558)..(559): n is a, c, g, or t
  misc_feature (561)..(561): n is a, c, g, or t
  misc_feature (570)..(570): n is a, c, g, or t
  misc_feature (574)..(574): n is a, c, g, or t
  misc_feature (576)..(576): n is a, c, g, or t
  misc_feature (582)..(582): n is a, c, g, or t
  misc_feature (588)..(588): n is a, c, g, or t
  misc_feature (592)..(594): n is a, c, g, or t
  misc_feature (596)..(596): n is a, c, g, or t
  misc_feature (600)..(600): n is a, c, g, or t
  misc_feature (602)..(602): n is a, c, g, or t
  misc_feature (608)..(608): n is a, c, g, or t
  misc_feature (610)..(611): n is a, c, g, or t
  misc_feature (613)..(613): n is a, c, g, or t
  misc_feature (619)..(619): n is a, c, g, or t
  misc_feature (621)..(624): n is a, c, g, or t
  misc_feature (627)..(627): n is a, c, g, or t
  misc_feature (630)..(630): n is a, c, g, or t
  misc_feature (633)..(633): n is a, c, g, or t
  misc_feature (638)..(638): n is a, c, g, or t
  misc_feature (641)..(641): n is a, c, g, or t
  misc_feature (656)..(656): n is a, c, g, or t
  misc_feature (658)..(659): n is a, c, g, or t
  misc_feature (663)..(663): n is a, c, g, or t
  misc_feature (666)..(667): n is a, c, g, or t
  misc_feature (669)..(670): n is a, c, g, or t
  misc_feature (676)..(676): n is a, c, g, or t
  misc_feature (679)..(680): n is a, c, g, or t
  misc_feature (686)..(686): n is a, c, g, or t
  misc_feature (691)..(691): n is a, c, g, or t
  misc_feature (702)..(702): n is a, c, g, or t
  misc_feature (706)..(706): n is a, c, g, or t
  misc_feature (708)..(708): n is a, c, g, or t
  misc_feature (713)..(717): n is a, c, g, or t
  misc_feature (725)..(725): n is a, c, g, or t
  misc_feature (737)..(737): n is a, c, g, or t
  misc_feature (749)..(749): n is a, c, g, or t
  misc_feature (752)..(754): n is a, c, g, or t
  misc_feature (756)..(756): n is a, c, g, or t
  misc_feature (759)..(760): n is a, c, g, or t
  misc_feature (765)..(765): n is a, c, g, or t
  misc_feature (768)..(768): n is a, c, g, or t
  misc_feature (774)..(774): n is a, c, g, or t
  misc_feature (777)..(777): n is a, c, g, or t
  misc_feature (782)..(782): n is a, c, g, or t
  misc_feature (787)..(787): n is a, c, g, or t
  misc_feature (792)..(793): n is a, c, g, or t
  misc_feature (795)..(795): n is a, c, g, or t
  misc_feature (797)..(797): n is a, c, g, or t
  misc_feature (801)..(801): n is a, c, g, or t
  misc_feature (803)..(805): n is a, c, g, or t
  misc_feature (809)..(809): n is a, c, g, or t
  misc_feature (811)..(811): n is a, c, g, or t
  misc_feature (818)..(818): n is a, c, g, or t
  misc_feature (821)..(821): n is a, c, g, or t
  misc_feature (824)..(824): n is a, c, g, or t
  misc_feature (828)..(829): n is a, c, g, or t
  misc_feature (832)..(832): n is a, c, g, or t
  misc_feature (837)..(837): n is a, c, g, or t
  misc_feature (842)..(842): n is a, c, g, or t
  misc_feature (852)..(852): n is a, c, g, or t
  misc_feature (857)..(858): n is a, c, g, or t
  misc_feature (864)..(864): n is a, c, g, or t
  misc_feature (871)..(872): n is a, c, g, or t
  misc_feature (877)..(877): n is a, c, g, or t
  misc_feature (883)..(883): n is a, c, g, or t
  misc_feature (886)..(889): n is a, c, g, or t
  misc_feature (897)..(898): n is a, c, g, or t
  misc_feature (903)..(904): n is a, c, g, or t
  misc_feature (910)..(910): n is a, c, g, or t
  misc_feature (924)..(924): n is a, c, g, or t
  misc_feature (926)..(926): n is a, c, g, or t
  misc_feature (929)..(929): n is a, c, g, or t
  misc_feature (932)..(932): n is a, c, g, or t
  misc_feature (936)..(937): n is a, c, g, or t
  misc_feature (941)..(941): n is a, c, g, or t
  misc_feature (943)..(946): n is a, c, g, or t
  misc_feature (952)..(952): n is a, c, g, or t
  misc_feature (956)..(956): n is a, c, g, or t
  misc_feature (958)..(960): n is a, c, g, or t
  misc_feature (965)..(965): n is a, c, g, or t
  misc_feature (983)..(983): n is a, c, g, or t
  misc_feature (987)..(988): n is a, c, g, or t
  misc_feature (990)..(990): n is a, c, g, or t
  misc_feature (996)..(996): n is a, c, g, or t
  misc_feature (999)..(1000): n is a, c, g, or t
  misc_feature (1007)..(1007): n is a, c, g, or t
  misc_feature (1013)..(1013): n is a, c, g, or t
  misc_feature (1016)..(1016): n is a, c, g, or t
  misc_feature (1021)..(1022): n is a, c, g, or t
  misc_feature (1027)..(1028): n is a, c, g, or t
  misc_feature (1030)..(1031): n is a, c, g, or t
  misc_feature (1039)..(1039): n is a, c, g, or t
  misc_feature (1049)..(1049): n is a, c, g, or t
  misc_feature (1051)..(1051): n is a, c, g, or t
  misc_feature (1054)..(1054): n is a, c, g, or t
  misc_feature (1056)..(1056): n is a, c, g, or t
  misc_feature (1058)..(1058): n is a, c, g, or t
  misc_feature (1060)..(1060): n is a, c, g, or t
  misc_feature (1062)..(1062): n is a, c, g, or t
  misc_feature (1065)..(1066): n is a, c, g, or t
  misc_feature (1070)..(1071): n is a, c, g, or t
  misc_feature (1090)..(1091): n is a, c, g, or t
  misc_feature (1093)..(1095): n is a, c, g, or t
  misc_feature (1101)..(1101): n is a, c, g, or t
  misc_feature (1107)..(1107): n is a, c, g, or t
  misc_feature (1109)..(1109): n is a, c, g, or t
  misc_feature (1113)..(1113): n is a, c, g, or t
  misc_feature (1117)..(1119): n is a, c, g, or t
  misc_feature (1134)..(1134): n is a, c, g, or t
  misc_feature (1139)..(1139): n is a, c, g, or t
  misc_feature (1141)..(1141): n is a, c, g, or t
  misc_feature (1146)..(1146): n is a, c, g, or t
  misc_feature (1153)..(1153): n is a, c, g, or t
  misc_feature (1157)..(1157): n is a, c, g, or t
  misc_feature (1170)..(1170): n is a, c, g, or t
  misc_feature (1174)..(1174): n is a, c, g, or t
  misc_feature (1176)..(1176): n is a, c, g, or t
  misc_feature (1192)..(1193): n is a, c, g, or t
  misc_feature (1197)..(1198): n is a, c, g, or t
  misc_feature (1205)..(1205): n is a, c, g, or t
  misc_feature (1208)..(1208): n is a, c, g, or t
  misc_feature (1216)..(1216): n is a, c, g, or t
  misc_feature (1221)..(1221): n is a, c, g, or t
  misc_feature (1223)..(1223): n is a, c, g, or t
  misc_feature (1229)..(1229): n is a, c, g, or t
  misc_feature (1235)..(1235): n is a, c, g, or t
  misc_feature (1239)..(1239): n is a, c, g, or t
  misc_feature (1247)..(1247): n is a, c, g, or t
  misc_feature (1259)..(1259): n is a, c, g, or t
  misc_feature (1261)..(1262): n is a, c, g, or t
  misc_feature (1264)..(1264): n is a, c, g, or t
  misc_feature (1267)..(1267): n is a, c, g, or t
  misc_feature (1280)..(1280): n is a, c, g, or t
  misc_feature (1283)..(1283): n is a, c, g, or t
  misc_feature (1286)..(1286): n is a, c, g, or t
  misc_feature (1297)..(1297): n is a, c, g, or t
  misc_feature (1301)..(1301): n is a, c, g, or t
  misc_feature (1305)..(1306): n is a, c, g, or t
  misc_feature (1310)..(1310): n is a, c, g, or t
  misc_feature (1312)..(1313): n is a, c, g, or t
  misc_feature (1315)..(1315): n is a, c, g, or t
  misc_feature (1321)..(1321): n is a, c, g, or t
  misc_feature (1323)..(1323): n is a, c, g, or t
  misc_feature (1327)..(1327): n is a, c, g, or t
  misc_feature (1329)..(1329): n is a, c, g, or t
  misc_feature (1331)..(1332): n is a, c, g, or t
  misc_feature (1337)..(1337): n is a, c, g, or t
  misc_feature (1339)..(1339): n is a, c, g, or t
  misc_feature (1341)..(1342): n is a, c, g, or t
  misc_feature (1345)..(1345): n is a, c, g, or t
  misc_feature (1351)..(1352): n is a, c, g, or t
  misc_feature (1362)..(1362): n is a, c, g, or t
  misc_feature (1367)..(1370): n is a, c, g, or t
  misc_feature (1383)..(1383): n is a, c, g, or t
  misc_feature (1388)..(1388): n is a, c, g, or t
  misc_feature (1390)..(1390): n is a, c, g, or t
  misc_feature (1394)..(1394): n is a, c, g, or t
  misc_feature (1402)..(1403): n is a, c, g, or t
  misc_feature (1412)..(1412): n is a, c, g, or t
  misc_feature (1415)..(1415): n is a, c, g, or t
  misc_feature (1417)..(1420): n is a, c, g, or t
  misc_feature (1422)..(1422): n is a, c, g, or t
  misc_feature (1438)..(1438): n is a, c, g, or t
  misc_feature (1442)..(1442): n is a, c, g, or t
  misc_feature (1449)..(1450): n is a, c, g, or t
  misc_feature (1454)..(1454): n is a, c, g, or t
  misc_feature (1458)..(1458): n is a, c, g, or t
  misc_feature (1468)..(1468): n is a, c, g, or t
  misc_feature (1477)..(1477): n is a, c, g, or t
  misc_feature (1485)..(1487): n is a, c, g, or t
  misc_feature (1492)..(1493): n is a, c, g, or t
  misc_feature (1495)..(1495): n is a, c, g, or t
  misc_feature (1497)..(1497): n is a, c, g, or t
  misc_feature (1503)..(1503): n is a, c, g, or t
  misc_feature (1506)..(1506): n is a, c, g, or t
nntagagaaattactatgagaggatcgcatcaccatcaccatcacgggatcctatttaggtgacactatagaatcgtcgacccacgcgtccggccgcctaccccggcaaaggggcggccccgtacgcgccgcccgcgccctcgcgcagatgccttagcccaccccatcagccttatgacgctgcccggcnaggcgggcgccgcgggcctggcaccgtcgggccacgccgccgccttcgggggcccgcccggcggnctcctgctggacgctctgccggggnnctacgctgncgccgccgccgggncgctgggcgccgcgcccgaccgcttcccggccgaactggacctcgacatgttcagcgggagcctcnagngcgacgtgnagtccatcntnctcaacgacttnatgganngngacgaaatggacttcnanttcnattcngccctgcctccaccgccacngggactggncggngcnnnaccccccaancaaagctgggtgcnggtnctganggacncatctnnntctcanggcnccnnattccnttncaaggngganntntaacttccnattnanattccngggtcnctgnnnantgantntaactncnnantaagangnnnnttnttnttntaggntanattttttcttaatgncnngttntcnngnncaattntanntaatgnttccntagattttaantatngnttttnnnnnatataaanagtaatttactntcttctattttnttnnnanaanntattnttntttaanaanaatcnctganttaanntnantttntnnncaananatatttnaanttnattnnatncattntattnttcaaaaaanagaannaaaaanataattnntatanaatttnatnnnnaatatatnnaaaanntaattnttctttaattattncnttnaanctanngaantnnnnaatttnaatnannncttcnttccatatacttattttngaannantttatnaannttattanataatnttntgatnnaaatnnanntcaaaaanttttttaaanantananantnanaannactnncttctataatttaagattnnannntttttnaatacnanattnctannnaaaagatatatatantaatntnttatnttttttnttanaaaaaaatattanactntnaaataatactttatannatannttgaaanttnttatgtcntttantntaatanctttgnactnttattttntcatagatatananncnatnataattatattantcnaanttttttcatanttanattnntctnanntnaattananttanantnnttacntntnnttnatagtnnatttcagaantcatnnnnctattaaattatnatcancnattnttttattnnctaatatanatnannnncnttcataattatttatnctantaatttnnattnactntattaatttnactaccatnatatatannntattnnancnttaacntan

SEQ ID NO: 464 - DNA, 1283 bp, Homo Sapiens
  misc_feature (1)..(1): n is a, c, g, or t
  misc_feature (796)..(796): n is a, c, g, or t
  misc_feature (818)..(818): n is a, c, g, or t
  misc_feature (911)..(911): n is a, c, g, or t
  misc_feature (942)..(942): n is a, c, g, or t
  misc_feature (947)..(947): n is a, c, g, or t
  misc_feature (965)..(965): n is a, c, g, or t
  misc_feature (974)..(974): n is a, c, g, or t
  misc_feature (984)..(985): n is a, c, g, or t
  misc_feature (993)..(993): n is a, c, g, or t
  misc_feature (1010)..(1010): n is a, c, g, or t
  misc_feature (1014)..(1014): n is a, c, g, or t
  misc_feature (1029)..(1029): n is a, c, g, or t
  misc_feature (1049)..(1050): n is a, c, g, or t
  misc_feature (1052)..(1052): n is a, c, g, or t
  misc_feature (1057)..(1058): n is a, c, g, or t
  misc_feature (1064)..(1064): n is a, c, g, or t
  misc_feature (1069)..(1070): n is a, c, g, or t
  misc_feature (1073)..(1073): n is a, c, g, or t
  misc_feature (1089)..(1090): n is a, c, g, or t
  misc_feature (1092)..(1092): n is a, c, g, or t
  misc_feature (1097)..(1098): n is a, c, g, or t
  misc_feature (1112)..(1112): n is a, c, g, or t
  misc_feature (1117)..(1118): n is a, c, g, or t
  misc_feature (1121)..(1121): n is a, c, g, or t
  misc_feature (1124)..(1124): n is a, c, g, or t
  misc_feature (1134)..(1135): n is a, c, g, or t
  misc_feature (1147)..(1147): n is a, c, g, or t
  misc_feature (1151)..(1151): n is a, c, g, or t
  misc_feature (1153)..(1154): n is a, c, g, or t
  misc_feature (1158)..(1158): n is a, c, g, or t
  misc_feature (1160)..(1162): n is a, c, g, or t
  misc_feature (1165)..(1165): n is a, c, g, or t
  misc_feature (1175)..(1175): n is a, c, g, or t
  misc_feature (1177)..(1178): n is a, c, g, or t
  misc_feature (1180)..(1180): n is a, c, g, or t
  misc_feature (1182)..(1187): n is a, c, g, or t
  misc_feature (1190)..(1190): n is a, c, g, or t
  misc_feature (1193)..(1193): n is a, c, g, or t
  misc_feature (1196)..(1197): n is a, c, g, or t
  misc_feature (1207)..(1207): n is a, c, g, or t
  misc_feature (1211)..(1213): n is a, c, g, or t
  misc_feature (1218)..(1220): n is a, c, g, or t
  misc_feature (1226)..(1226): n is a, c, g, or t
  misc_feature (1233)..(1234): n is a, c, g, or t
  misc_feature (1236)..(1236): n is a, c, g, or t
  misc_feature (1239)..(1239): n is a, c, g, or t
  misc_feature (1243)..(1244): n is a, c, g, or t
  misc_feature (1249)..(1253): n is a, c, g, or t
  misc_feature (1255)..(1255): n is a, c, g, or t
  misc_feature (1259)..(1260): n is a, c, g, or t
  misc_feature (1266)..(1266): n is a, c, g, or t
  misc_feature (1269)..(1269): n is a, c, g, or t
  misc_feature (1271)..(1271): n is a, c, g, or t
  misc_feature (1278)..(1278): n is a, c, g, or t
  misc_feature (1280)..(1280): n is a, c, g, or t
naattagagaaattactatgagaggatcgcatcaccatcaccatcacggatcctatttaggtgacactatagaatcgtcgacccacgcgtccgggttccccgacgtgctgcagcaagtgcctttgccctgcctgtgggctccctccatggccaactctgctatggacaccagagtactctgctgtgcggtcatctgtcttctgggggcagacaccgtggatggtggaatcactcagtccccgaagtacctgttcagaaaggaaggacagaatgtgaccctgagttgtgaacagaatttgaaccacgatgccatgtactggtaccgacaggacccagggcaagggctgagattgatctactactcacagatagtaaatgactttcagaaaggagatatagctgaagggtacagcgtctctcgggagaagaaggaatcctttcctctcactgtgacatcggcccaaaagaacccgacagctttctatctctgtgccagtagtatgggactagcgtacgagcagtacttcgggccgggcaccaggctcacggtcacagaggacctgaaaaacgtgttcccacccgaggtcgctgtgtttgagccatcagaagcagagatctcccacacccaaaaggccacactggtgtgcctggccacaggcttctaccccgaccacgtggagctgagctggtgggtgaatgggaaggaggtgcacagtggggtcagcacagacccgcagcccctcaaggagcagcccgccctcaatgactccagatactgcctgagcagccgcctganggtctcggccaccttctggcanaacccccgcaaccacttccgctgtcaagtccagttctacgggctctcggagaatgacgagtggacccaggatagggccaaacctgtcacccanaatcgtcagcgcccaaggcctgggggtaaancaaantgtggcttcccctccgantcttaccancaaggggtcnngtctgccnccatcctctatgaaatnttgntagggaaaggccccnttgtatgccgggctggtcanngnccccnngctganggccnnggncaaaaaaaaggatccnnangctanntccaaaaccttccnaggtnnttnttntcctcccccnnaattcccccggnaccngnncccnannnggnttccaaaaangnntncnnnnnnggnttnccnnccccaaaatnaaannnaaaannncccccnttttttnngnttncccnnaaaannnnncncccnncccccnaananaaaaaangnaaa

SEQ ID NO: 465 - DNA, 1557 bp, Homo Sapiens
  misc_feature (2)..(2): n is a, c, g, or t
  misc_feature (56)..(56): n is a, c, g, or t
  misc_feature (77)..(77): n is a, c, g, or t
  misc_feature (100)..(101): n is a, c, g, or t
  misc_feature (138)..(138): n is a, c, g, or t
  misc_feature (146)..(147): n is a, c, g, or t
  misc_feature (167)..(169): n is a, c, g, or t
  misc_feature (175)..(175): n is a, c, g, or t
  misc_feature (198)..(198): n is a, c, g, or t
  misc_feature (206)..(207): n is a, c, g, or t
  misc_feature (209)..(209): n is a, c, g, or t
  misc_feature (223)..(223): n is a, c, g, or t
  misc_feature (245)..(245): n is a, c, g, or t
  misc_feature (277)..(277): n is a, c, g, or t
  misc_feature (279)..(279): n is a, c, g, or t
  misc_feature (287)..(287): n is a, c, g, or t
  misc_feature (293)..(294): n is a, c, g, or t
  misc_feature (299)..(299): n is a, c, g, or t
  misc_feature (302)..(302): n is a, c, g, or t
  misc_feature (315)..(315): n is a, c, g, or t
  misc_feature (318)..(319): n is a, c, g, or t
  misc_feature (323)..(323): n is a, c, g, or t
  misc_feature (325)..(327): n is a, c, g, or t
  misc_feature (329)..(329): n is a, c, g, or t
  misc_feature (331)..(331): n is a, c, g, or t
  misc_feature (338)..(338): n is a, c, g, or t
  misc_feature (345)..(347): n is a, c, g, or t
  misc_feature (350)..(351): n is a, c, g, or t
  misc_feature (355)..(355): n is a, c, g, or t
  misc_feature (361)..(361): n is a, c, g, or t
  misc_feature (364)..(364): n is a, c, g, or t
  misc_feature (366)..(366): n is a, c, g, or t
  misc_feature (370)..(370): n is a, c, g, or t
  misc_feature (372)..(372): n is a, c, g, or t
  misc_feature (377)..(377): n is a, c, g, or t
  misc_feature (380)..(381): n is a, c, g, or t
  misc_feature (383)..(383): n is a, c, g, or t
  misc_feature (386)..(386): n is a, c, g, or t
  misc_feature (396)..(396): n is a, c, g, or t
  misc_feature (398)..(398): n is a, c, g, or t
  misc_feature (401)..(402): n is a, c, g, or t
  misc_feature (407)..(407): n is a, c, g, or t
  misc_feature (412)..(414): n is a, c, g, or t
  misc_feature (416)..(416): n is a, c, g, or t
  misc_feature (418)..(420): n is a, c, g, or t
  misc_feature (427)..(427): n is a, c, g, or t
  misc_feature (433)..(433): n is a, c, g, or t
  misc_feature (435)..(436): n is a, c, g, or t
  misc_feature (438)..(438): n is a, c, g, or t
  misc_feature (448)..(451): n is a, c, g, or t
  misc_feature (453)..(453): n is a, c, g, or t
  misc_feature (456)..(456): n is a, c, g, or t
  misc_feature (458)..(459): n is a, c, g, or t
  misc_feature (465)..(465): n is a, c, g, or t
  misc_feature (468)..(468): n is a, c, g, or t
  misc_feature (471)..(471): n is a, c, g, or t
  misc_feature (474)..(475): n is a, c, g, or t
  misc_feature (480)..(480): n is a, c, g, or t
  misc_feature (483)..(483): n is a, c, g, or t
  misc_feature (500)..(500): n is a, c, g, or t
  misc_feature (503)..(503): n is a, c, g, or t
  misc_feature (505)..(507): n is a, c, g, or t
  misc_feature (511)..(511): n is a, c, g, or t
  misc_feature (513)..(513): n is a, c, g, or t
  misc_feature (523)..(523): n is a, c, g, or t
  misc_feature (532)..(534): n is a, c, g, or t
  misc_feature (541)..(541): n is a, c, g, or t
  misc_feature (553)..(553): n is a, c, g, or t
  misc_feature (558)..(558): n is a, c, g, or t
  misc_feature (562)..(563): n is a, c, g, or t
  misc_feature (571)..(572): n is a, c, g, or t
  misc_feature (575)..(575): n is a, c, g, or t
  misc_feature (577)..(577): n is a, c, g, or t
  misc_feature (579)..(579): n is a, c, g, or t
  misc_feature (581)..(581): n is a, c, g, or t
  misc_feature (584)..(584): n is a, c, g, or t
  misc_feature (592)..(592): n is a, c, g, or t
  misc_feature (596)..(596): n is a, c, g, or t
  misc_feature (598)..(600): n is a, c, g, or t
  misc_feature (602)..(602): n is a, c, g, or t
  misc_feature (604)..(605): n is a, c, g, or t
  misc_feature (610)..(610): n is a, c, g, or t
  misc_feature (613)..(613): n is a, c, g, or t
  misc_feature (615)..(615): n is a, c, g, or t
  misc_feature (621)..(621): n is a, c, g, or t
  misc_feature (623)..(623): n is a, c, g, or t
  misc_feature (625)..(625): n is a, c, g, or t
  misc_feature (629)..(629): n is a, c, g, or t
  misc_feature (633)..(635): n is a, c, g, or t
  misc_feature (638)..(640): n is a, c, g, or t
  misc_feature (645)..(646): n is a, c, g, or t
  misc_feature (648)..(648): n is a, c, g, or t
  misc_feature (650)..(650): n is a, c, g, or t
  misc_feature (653)..(653): n is a, c, g, or t
  misc_feature (655)..(656): n is a, c, g, or t
  misc_feature (658)..(658): n is a, c, g, or t
  misc_feature (663)..(663): n is a, c, g, or t
  misc_feature (665)..(665): n is a, c, g, or t
  misc_feature (667)..(667): n is a, c, g, or t
  misc_feature (670)..(670): n is a, c, g, or t
  misc_feature (672)..(673): n is a, c, g, or t
  misc_feature (677)..(677): n is a, c, g, or t
  misc_feature (679)..(679): n is a, c, g, or t
  misc_feature (683)..(683): n is a, c, g, or t
  misc_feature (686)..(686): n is a, c, g, or t
  misc_feature (693)..(693): n is a, c, g, or t
  misc_feature (696)..(696): n is a, c, g, or t
  misc_feature (702)..(703): n is a, c, g, or t
  misc_feature (707)..(709): n is a, c, g, or t
  misc_feature (712)..(712): n is a, c, g, or t
  misc_feature (714)..(714): n is a, c, g, or t
  misc_feature (717)..(717): n is a, c, g, or t
  misc_feature (719)..(720): n is a, c, g, or t
  misc_feature (727)..(727): n is a, c, g, or t
  misc_feature (732)..(732): n is a, c, g, or t
  misc_feature (734)..(734): n is a, c, g, or t
  misc_feature (740)..(744): n is a, c, g, or t
  misc_feature (747)..(748): n is a, c, g, or t
  misc_feature (751)..(751): n is a, c, g, or t
  misc_feature (763)..(764): n is a, c, g, or t
  misc_feature (781)..(781): n is a, c, g, or t
  misc_feature (788)..(789): n is a, c, g, or t
  misc_feature (792)..(792): n is a, c, g, or t
  misc_feature (794)..(794): n is a, c, g, or t
  misc_feature (796)..(796): n is a, c, g, or t
  misc_feature (800)..(800): n is a, c, g, or t
  misc_feature (802)..(803): n is a, c, g, or t
  misc_feature (805)..(807): n is a, c, g, or t
  misc_feature (809)..(809): n is a, c, g, or t
  misc_feature (817)..(817): n is a, c, g, or t
  misc_feature (819)..(819): n is a, c, g, or t
  misc_feature (823)..(826): n is a, c, g, or t
  misc_feature (829)..(830): n is a, c, g, or t
  misc_feature (832)..(832): n is a, c, g, or t
  misc_feature (836)..(841): n is a, c, g, or t
  misc_feature (846)..(848): n is a, c, g, or t
  misc_feature (852)..(852): n is a, c, g, or t
  misc_feature (854)..(855): n is a, c, g, or t
  misc_feature (861)..(861): n is a, c, g, or t
  misc_feature (864)..(864): n is a, c, g, or t
  misc_feature (872)..(873): n is a, c, g, or t
  misc_feature (878)..(882): n is a, c, g, or t
  misc_feature (887)..(887): n is a, c, g, or t
  misc_feature (892)..(893): n is a, c, g, or t
  misc_feature (895)..(896): n is a, c, g, or t
  misc_feature (899)..(899): n is a, c, g, or t
  misc_feature (901)..(901): n is a, c, g, or t
  misc_feature (906)..(906): n is a, c, g, or t
  misc_feature (908)..(909): n is a, c, g, or t
  misc_feature (913)..(913): n is a, c, g, or t
  misc_feature (918)..(918): n is a, c, g, or t
  misc_feature (922)..(925): n is a, c, g, or t
  misc_feature (930)..(932): n is a, c, g, or t
  misc_feature (935)..(935): n is a, c, g, or t
  misc_feature (937)..(939): n is a, c, g, or t
  misc_feature (941)..(942): n is a, c, g, or t
  misc_feature (944)..(944): n is a, c, g, or t
  misc_feature (954)..(954): n is a, c, g, or t
  misc_feature (960)..(960): n is a, c, g, or t
  misc_feature (963)..(964): n is a, c, g, or t
  misc_feature (966)..(966): n is a, c, g, or t
  misc_feature (968)..(969): n is a, c, g, or t
  misc_feature (972)..(972): n is a, c, g, or t
  misc_feature (976)..(977): n is a, c, g, or t
  misc_feature (980)..(981): n is a, c, g, or t
  misc_feature (983)..(983): n is a, c, g, or t
  misc_feature (991)..(991): n is a, c, g, or t
  misc_feature (997)..(997): n is a, c, g, or t
  misc_feature (1000)..(1000): n is a, c, g, or t
  misc_feature (1002)..(1002): n is a, c, g, or t
  misc_feature (1009)..(1011): n is a, c, g, or t
  misc_feature (1013)..(1013): n is a, c, g, or t
  misc_feature (1015)..(1015): n is a, c, g, or t
  misc_feature (1017)..(1017): n is a, c, g, or t
  misc_feature (1020)..(1022): n is a, c, g, or t
  misc_feature (1024)..(1026): n is a, c, g, or t
  misc_feature (1029)..(1029): n is a, c, g, or t
  misc_feature (1032)..(1033): n is a, c, g, or t
  misc_feature (1037)..(1037): n is a, c, g, or t
  misc_feature (1043)..(1043): n is a, c, g, or t
  misc_feature (1046)..(1046): n is a, c, g, or t
  misc_feature (1050)..(1050): n is a, c, g, or t
  misc_feature (1060)..(1061): n is a, c, g, or t
  misc_feature (1069)..(1069): n is a, c, g, or t
  misc_feature (1076)..(1076): n is a, c, g, or t
  misc_feature (1096)..(1096): n is a, c, g, or t
  misc_feature (1100)..(1102): n is a, c, g, or t
  misc_feature (1107)..(1112): n is a, c, g, or t
  misc_feature (1114)..(1118): n is a, c, g, or t
  misc_feature (1123)..(1123): n is a, c, g, or t
  misc_feature (1130)..(1130): n is a, c, g, or t
  misc_feature (1135)..(1136): n is a, c, g, or t
  misc_feature (1138)..(1138): n is a, c, g, or t
  misc_feature (1143)..(1144): n is a, c, g, or t
  misc_feature (1147)..(1149): n is a, c, g, or t
  misc_feature (1155)..(1156): n is a, c, g, or t
  misc_feature (1163)..(1164): n is a, c, g, or t
  misc_feature (1170)..(1170): n is a, c, g, or t
  misc_feature (1174)..(1174): n is a, c, g, or t
  misc_feature (1176)..(1177): n is a, c, g, or t
  misc_feature (1183)..(1183): n is a, c, g, or t
  misc_feature (1186)..(1186): n is a, c, g, or t
  misc_feature (1194)..(1194): n is a, c, g, or t
  misc_feature (1197)..(1197): n is a, c, g, or t
  misc_feature (1203)..(1203): n is a, c, g, or t
  misc_feature (1207)..(1207): n is a, c, g, or t
  misc_feature (1209)..(1209): n is a, c, g, or t
  misc_feature (1212)..(1212): n is a, c, g, or t
  misc_feature (1215)..(1215): n is a, c, g, or t
  misc_feature (1227)..(1228): n is a, c, g, or t
  misc_feature (1230)..(1230): n is a, c, g, or t
  misc_feature (1236)..(1236): n is a, c, g, or t
  misc_feature (1243)..(1243): n is a, c, g, or t
  misc_feature (1248)..(1248): n is a, c, g, or t
  misc_feature (1250)..(1250): n is a, c, g, or t
  misc_feature (1253)..(1253): n is a, c, g, or t
  misc_feature (1257)..(1257): n is a, c, g, or t
  misc_feature (1261)..(1261): n is a, c, g, or t
  misc_feature (1265)..(1265): n is a, c, g, or t
  misc_feature (1267)..(1267): n is a, c, g, or t
  misc_feature (1274)..(1274): n is a, c, g, or t
  misc_feature (1277)..(1278): n is a, c, g, or t
  misc_feature (1286)..(1288): n is a, c, g, or t
  misc_feature (1292)..(1292): n is a, c, g, or t
  misc_feature (1298)..(1298): n is a, c, g, or t
  misc_feature (1302)..(1302): n is a, c, g, or t
  misc_feature (1317)..(1317): n is a, c, g, or t
  misc_feature (1320)..(1320): n is a, c, g, or t
  misc_feature (1322)..(1323): n is a, c, g, or t
  misc_feature (1331)..(1332): n is a, c, g, or t
  misc_feature (1335)..(1335): n is a, c, g, or t
  misc_feature (1337)..(1337): n is a, c, g, or t
  misc_feature (1339)..(1339): n is a, c, g, or t
  misc_feature (1344)..(1344): n is a, c, g, or t
  misc_feature (1350)..(1350): n is a, c, g, or t
  misc_feature (1356)..(1357): n is a, c, g, or t
  misc_feature (1361)..(1361): n is a, c, g, or t
  misc_feature (1363)..(1363): n is a, c, g, or t
  misc_feature (1367)..(1367): n is a, c, g, or t
  misc_feature (1370)..(1370): n is a, c, g, or t
  misc_feature (1373)..(1373): n is a, c, g, or t
  misc_feature (1384)..(1384): n is a, c, g, or t
  misc_feature (1389)..(1389): n is a, c, g, or t
  misc_feature (1395)..(1395): n is a, c, g, or t
  misc_feature (1398)..(1398): n is a, c, g, or t
  misc_feature (1401)..(1401): n is a, c, g, or t
  misc_feature (1412)..(1412): n is a, c, g, or t
  misc_feature (1417)..(1417): n is a, c, g, or t
  misc_feature (1419)..(1419): n is a, c, g, or t
  misc_feature (1421)..(1421): n is a, c, g, or t
  misc_feature (1423)..(1423): n is a, c, g, or t
  misc_feature (1427)..(1427): n is a, c, g, or t
  misc_feature (1432)..(1433): n is a, c, g, or t
  misc_feature (1444)..(1444): n is a, c, g, or t
  misc_feature (1447)..(1447): n is a, c, g, or t
  misc_feature (1450)..(1450): n is a, c, g, or t
  misc_feature (1464)..(1464): n is a, c, g, or t
  misc_feature (1467)..(1467): n is a, c, g, or t
  misc_feature (1469)..(1469): n is a, c, g, or t
  misc_feature (1474)..(1474): n is a, c, g, or t
  misc_feature (1479)..(1479): n is a, c, g, or t
  misc_feature (1481)..(1481): n is a, c, g, or t
  misc_feature (1483)..(1483): n is a, c, g, or t
  misc_feature (1487)..(1489): n is a, c, g, or t
  misc_feature (1492)..(1492): n is a, c, g, or t
  misc_feature (1494)..(1494): n is a, c, g, or t
  misc_feature (1499)..(1499): n is a, c, g, or t
  misc_feature (1503)..(1503): n is a, c, g, or t
  misc_feature (1516)..(1517): n is a, c, g, or t
  misc_feature (1520)..(1520): n is a, c, g, or t
  misc_feature (1525)..(1525): n is a, c, g, or t
  misc_feature (1532)..(1532): n is a, c, g, or t
  misc_feature (1535)..(1535): n is a, c, g, or t
  misc_feature (1537)..(1540): n is a, c, g, or t
  misc_feature (1546)..(1546): n is a, c, g, or t
  misc_feature (1551)..(1551): n is a, c, g, or t
  misc_feature (1556)..(1556): n is a, c, g, or t
anaatagagaaaattatctatgagaggatcgcatcaccactcaccatcacggtatnctattttaggtgacactatanaatcgtcgacccacgcgttccgnncggagtcccctacccggcccggcgcccgccgctgacngcggcggnngtgggggggcgcgcgcctgnnntcctgnctaccccctggtcgtcaacaccntgggccgnnanggtgttgcggcccngggctgcgacctcccccgcggntattccctggagggacccaggagttgccgccngnctttcccntggccnnggagntangatgagctgctancannaccnannnancngtgctanggccccnnngtnnctgnactagnttntnacananagganccnngntantaacatggcncntcnngagcncatannnancnnnctcagtnaaatgnanntnaagattgtannnncnacngnntgcaanatnaancannaggangantatcttttgtaacaatntgnannnttancncctcttagantcctgtttnnntttgaanaaatgtaatacngggtnacanntttctttnnagngntntngcnaaaaattnaatntnnntnanncaacntangnagagtnananaccntatnnnttnnnatttnncntnaancnnanagatnancnttnannattntnacanaanaccgaanatntgttgnntaannncancntantnntgcctgnaaaananataaannnnncanntangataataaccannacgaatatcttgtaagncatcgtnnttnanancttntnntnnntnatgaagantngccnnnnaanncnccannnnnncaatnnncctnanntgaaantantaaaactnnaactnnnnntaaanataanntnnaananaaaanannccanatttnaatnnnnctcannnaancnnncnnanccaaaataantactanganntncnncanattnnaannantatagaanttaganatntntttaatnnnanananaannntnnnttntannaaantataanaantttncttaaaaagnntaaaaaanataaaantagcaaaaaaaaataatctntttnnnaaaannnnnngnnnnnagatnctcaaanatggnnanaaaanncannntatacnnagtatanntaacanaaantnnaaaaanagnaaataatntanaaacantttnanagnctntaaaatacaaannancaattnaatatanactanantanaacnatanaatnantttattncanngcatagtnnnctgncatatnttanagctttttaaaaatnttntnntacgatcnntcntnanttcanaaatanatcacnntaantnatgnatnccntttctaataanaaaangttttnttncancataaaataanctaantnananaaanaattnnctatttttacnaantcnttaaccaaaatgcnatntnctacncatantngntatnnngtntncagcnatantatcataataggnntcnctgcncttattntcnannnnagattncatantgacng

SEQ ID NO: 466 - DNA, 1388 bp, Homo Sapiens
  misc_feature (785)..(785): n is a, c, g, or t
  misc_feature (831)..(831): n is a, c, g, or t
  misc_feature (889)..(889): n is a, c, g, or t
  misc_feature (895)..(895): n is a, c, g, or t
  misc_feature (897)..(897): n is a, c, g, or t
  misc_feature (916)..(916): n is a, c, g, or t
  misc_feature (919)..(919): n is a, c, g, or t
  misc_feature (932)..(932): n is a, c, g, or t
  misc_feature (942)..(942): n is a, c, g, or t
  misc_feature (944)..(944): n is a, c, g, or t
  misc_feature (973)..(973): n is a, c, g, or t
  misc_feature (975)..(975): n is a, c, g, or t
  misc_feature (978)..(978): n is a, c, g, or t
  misc_feature (1005)..(1005): n is a, c, g, or t
  misc_feature (1010)..(1010): n is a, c, g, or t
  misc_feature (1014)..(1014): n is a, c, g, or t
  misc_feature (1021)..(1021): n is a, c, g, or t
  misc_feature (1025)..(1025): n is a, c, g, or t
  misc_feature (1030)..(1031): n is a, c, g, or t
  misc_feature (1042)..(1042): n is a, c, g, or t
  misc_feature (1055)..(1055): n is a, c, g, or t
  misc_feature (1062)..(1062): n is a, c, g, or t
  misc_feature (1066)..(1066): n is a, c, g, or t
  misc_feature (1072)..(1072): n is a, c, g, or t
  misc_feature (1083)..(1083): n is a, c, g, or t
  misc_feature (1096)..(1096): n is a, c, g, or t
  misc_feature (1099)..(1099): n is a, c, g, or t
  misc_feature (1111)..(1112): n is a, c, g, or t
  misc_feature (1115)..(1115): n is a, c, g, or t
  misc_feature (1122)..(1122): n is a, c, g, or t
  misc_feature (1133)..(1133): n is a, c, g, or t
  misc_feature (1143)..(1143): n is a, c, g, or t
  misc_feature (1155)..(1155): n is a, c, g, or t
  misc_feature (1166)..(1166): n is a, c, g, or t
  misc_feature (1179)..(1179): n is a, c, g, or t
  misc_feature (1182)..(1182): n is a, c, g, or t
  misc_feature (1191)..(1191): n is a, c, g, or t
  misc_feature (1197)..(1197): n is a, c, g, or t
  misc_feature (1218)..(1218): n is a, c, g, or t
  misc_feature (1220)..(1220): n is a, c, g, or t
  misc_feature (1222)..(1222): n is a, c, g, or t
  misc_feature (1242)..(1243): n is a, c, g, or t
  misc_feature (1245)..(1245): n is a, c, g, or t
  misc_feature (1249)..(1249): n is a, c, g, or t
  misc_feature (1255)..(1255): n is a, c, g, or t
  misc_feature (1278)..(1278): n is a, c, g, or t
  misc_feature (1295)..(1296): n is a, c, g, or t
  misc_feature (1300)..(1301): n is a, c, g, or t
  misc_feature (1303)..(1303): n is a, c, g, or t
  misc_feature (1305)..(1305): n is a, c, g, or t
  misc_feature (1333)..(1334): n is a, c, g, or t
  misc_feature (1340)..(1340): n is a, c, g, or t
  misc_feature (1344)..(1347): n is a, c, g, or t
  misc_feature (1351)..(1352): n is a, c, g, or t
  misc_feature (1360)..(1360): n is a, c, g, or t
  misc_feature (1365)..(1365): n is a, c, g, or t
  misc_feature (1367)..(1367): n is a, c, g, or t
  misc_feature (1370)..(1370): n is a, c, g, or t
tagagagattactatgagaggatcgcatcaccatcaccatcacggatcctatttaggtgacactatagaatcgtcgacccacgcgtccggtagttttctctgcgcgtgtgcgttttccctcctcccccgccctcagggtccacggccaccatggcgtattaggggcagcagtgcctgcggcagcattggcctttgcagcggcggcagcagcaccaggctctgcagcggcaacccccagcggcttaagccatggcgcttctcacggcattcagcagcagcgttgctgtaaccgacaaagacaccttcgaattaagcacattcctcgattccagcaaagcaccgcaacatgaccgaaatgagcttcctgagcagcgaggtgttggtgggggacttgatgtcccccttcgacccgtcgggtttgggggctgaagaaagcctaggtctcttagatgattacctggaggtggccaagcacttcaaacctcatgggttctccagcgacaaggctaaggcgggctcctccgaatggctggctgtggatgggttggtcagtccctccaacaacagcaaggaggatgccttctccgggacagattggatgttggagaaaatggatttgaaggagttcgacttggatgccctgttgggtatagatgacctggaaaccatgccagatgaccttctgaccacgttggatgacacttgtgatctctttgcccccctagtccaggaaaactaataagcagccccccccagacggtgaaccccaattggccatctcccanaaagtttaaaaaaaacccgaccaggttgcccccttcaccttcttanaacctcttcccttttccccagggggtcctgtcctccactccagaatcattccctttanttttananctgggcagtgaagtggaantcncttgaaaggaaanaggaagccanantaaactggcttacgttgccatgaatcccncnagngcaataaaggaaggaaaaaaccccctncaaanaaanaaagggncatntgtannaacccaaaatnctatttggggttncctcaanaaancccctnacaagggtttncaaaataagaccnccncctccaaggttnnccngggggtngccctccaaancttaaaatcncctgaaaaaaanggaccccaaantaaggggggaaancgntaaaaattnaaaaantggaaaaaaaaaacccccctngntncccaaaaaaaagggaaaaanngncttntggggnggaaaatggaaaaaaaaagcttnaaaaaagggatcccgcnngaanncncnaaaatttaaaaaccccggggggaaaaanncccttnaaannnnccannttttaaanggtantnttnaaaattttaaaaaaaaaa

SEQ ID NO: 467 - DNA, 1421 bp, Homo Sapiens
  misc_feature (748)..(748): n is a, c, g, or t
  misc_feature (817)..(817): n is a, c, g, or t
  misc_feature (850)..(850): n is a, c, g, or t
  misc_feature (892)..(892): n is a, c, g, or t
  misc_feature (925)..(925): n is a, c, g, or t
  misc_feature (928)..(928): n is a, c, g, or t
  misc_feature (954)..(954): n is a, c, g, or t
  misc_feature (964)..(964): n is a, c, g, or t
  misc_feature (975)..(975): n is a, c, g, or t
  misc_feature (987)..(987): n is a, c, g, or t
  misc_feature (998)..(998): n is a, c, g, or t
  misc_feature (1013)..(1013): n is a, c, g, or t
  misc_feature (1020)..(1021): n is a, c, g, or t
  misc_feature (1026)..(1026): n is a, c, g, or t
  misc_feature (1039)..(1039): n is a, c, g, or t
  misc_feature (1061)..(1061): n is a, c, g, or t
  misc_feature (1063)..(1064): n is a, c, g, or t
  misc_feature (1067)..(1067): n is a, c, g, or t
  misc_feature (1086)..(1086): n is a, c, g, or t
  misc_feature (1094)..(1094): n is a, c, g, or t
  misc_feature (1097)..(1098): n is a, c, g, or t
  misc_feature (1102)..(1102): n is a, c, g, or t
  misc_feature (1106)..(1106): n is a, c, g, or t
  misc_feature (1112)..(1112): n is a, c, g, or t
  misc_feature (1117)..(1117): n is a, c, g, or t
  misc_feature (1119)..(1119): n is a, c, g, or t
  misc_feature (1127)..(1127): n is a, c, g, or t
  misc_feature (1138)..(1138): n is a, c, g, or t
  misc_feature (1141)..(1141): n is a, c, g, or t
  misc_feature (1152)..(1152): n is a, c, g, or t
  misc_feature (1159)..(1160): n is a, c, g, or t
  misc_feature (1164)..(1164): n is a, c, g, or t
  misc_feature (1167)..(1167): n is a, c, g, or t
  misc_feature (1169)..(1171): n is a, c, g, or t
  misc_feature (1175)..(1175): n is a, c, g, or t
  misc_feature (1182)..(1182): n is a, c, g, or t
  misc_feature (1188)..(1189): n is a, c, g, or t
  misc_feature (1193)..(1193): n is a, c, g, or t
  misc_feature (1195)..(1197): n is a, c, g, or t
  misc_feature (1200)..(1201): n is a, c, g, or t
  misc_feature (1204)..(1204): n is a, c, g, or t
  misc_feature (1207)..(1207): n is a, c, g, or t
  misc_feature (1209)..(1209): n is a, c, g, or t
  misc_feature (1219)..(1222): n is a, c, g, or t
  misc_feature (1224)..(1224): n is a, c, g, or t
  misc_feature (1228)..(1228): n is a, c, g, or t
  misc_feature (1232)..(1232): n is a, c, g, or t
  misc_feature (1238)..(1238): n is a, c, g, or t
  misc_feature (1245)..(1245): n is a, c, g, or t
  misc_feature (1252)..(1252): n is a, c, g, or t
  misc_feature (1255)..(1257): n is a, c, g, or t
  misc_feature (1264)..(1264): n is a, c, g, or t
  misc_feature (1267)..(1270): n is a, c, g, or t
  misc_feature (1272)..(1272): n is a, c, g, or t
  misc_feature (1274)..(1276): n is a, c, g, or t
  misc_feature (1278)..(1290): n is a, c, g, or t
  misc_feature (1292)..(1307): n is a, c, g, or t
  misc_feature (1309)..(1313): n is a, c, g, or t
  misc_feature (1315)..(1324): n is a, c, g, or t
  misc_feature (1326)..(1334): n is a, c, g, or t
  misc_feature (1336)..(1338): n is a, c, g, or t
  misc_feature (1340)..(1352): n is a, c, g, or t
  misc_feature (1372)..(1376): n is a, c, g, or t
  misc_feature (1379)..(1380): n is a, c, g, or t
  misc_feature (1382)..(1386): n is a, c, g, or t
  misc_feature (1388)..(1392): n is a, c, g, or t
  misc_feature (1394)..(1395): n is a, c, g, or t
  misc_feature (1397)..(1404): n is a, c, g, or t
  misc_feature (1406)..(1406): n is a, c, g, or t
  misc_feature (1408)..(1414): n is a, c, g, or t
  misc_feature (1416)..(1416): n is a, c, g, or t
  misc_feature (1418)..(1418): n is a, c, g, or t
  misc_feature (1421)..(1421): n is a, c, g, or t
atagagaaattactatgagaggatcgcatcaccatcaccatcacggatcctatttaggtgacactatagaatcgtcgacccacgcgtccgggcgggcacccggcggccaggagagagagggagggcgccacgcaccggactgcgggccgagagcgcgcacgccgcgctccgcccctgctgccgcccccgtcgccgccgccgccgccgccgcagcttgggaggtgctgccaccacaggtacctgcacatgttgttctttgtcagtgctggcacaagaacctcctggcagtagatgtatttcgttcacctttgtcccgggcattccaactggtggaggagatccggaaccacgtgctgagagacagctctgggatcaggagcttggaggagttgtgtctgcaagtgaccgacctgctgccaggccttaggaagctcaggaacctactccctgagcatggatgcctgctgctgtcccctgggaacttctggcagaatgactgggaacgcttccatgctgatcctgacatcattgggaccatccaccagcacgagcctaaaaccctgcagacttcagccacactcaaagacttgttatttggtgttcctgggaagtacagcggggtgagcctctacaccaggaagaggatggtctcctacaccatcaccctggtcttccagcactaccatgccaagttcctgggcagcctgcgtgcccgcctgatgcttctgcaccccagccccaactgcanccttcgggcggagagcctggtccacgtgcacttcaaggaggagattggtgtcgctgaactcatcccccnttgtgaccacctacatcatcttgtttgcctaanatctacttctccacgcggaaaatcgacatggtcaagtccaantggggggctgggcctggctgcccggggtcacantgntcaactcccttgctcatgtctgtggnaattttgcanactttttcggncttgaaccccanccttcaatggngggtaggtccctaanaggttcnntgggncaaaagggggggnttcaggccaaaaaaacccttgncnnttntgggttttgggccttcccngaatttgntgnnaccncccnttttcnatttntnttttttanatttaaaaaanaanttttcctcccntttttgnngggntgnannnaaantgggttnaaaaannaaanannntannggnggncnatttaaaaannnntntttngggngggggntaaaaangggggtnttnnnttttttnaannnnanannntnnnnnnnnnnnnnannnnnnnnnnnnnnnntnnnnnannnnnnnnnnannnnnnnnntnnntnnnnnnnnnnnnnaaaaaaaaaaattttttttnnnnnaannannnnnannnnntnnannnnnnnnanannnnnnntntnttn

SEQ ID NO: 468 - DNA, 1384 bp, Homo Sapiens
  misc_feature (534)..(534): n is a, c, g, or t
  misc_feature (616)..(616): n is a, c, g, or t
  misc_feature (638)..(638): n is a, c, g, or t
  misc_feature (644)..(644): n is a, c, g, or t
  misc_feature (681)..(681): n is a, c, g, or t
  misc_feature (698)..(698): n is a, c, g, or t
  misc_feature (702)..(702): n is a, c, g, or t
  misc_feature (726)..(726): n is a, c, g, or t
  misc_feature (749)..(749): n is a, c, g, or t
  misc_feature (755)..(755): n is a, c, g, or t
  misc_feature (760)..(760): n is a, c, g, or t
  misc_feature (769)..(769): n is a, c, g, or t
  misc_feature (778)..(778): n is a, c, g, or t
  misc_feature (785)..(786): n is a, c, g, or t
  misc_feature (795)..(795): n is a, c, g, or t
  misc_feature (808)..(808): n is a, c, g, or t
  misc_feature (811)..(811): n is a, c, g, or t
  misc_feature (818)..(819): n is a, c, g, or t
  misc_feature (827)..(827): n is a, c, g, or t
  misc_feature (832)..(832): n is a, c, g, or t
  misc_feature (835)..(835): n is a, c, g, or t
  misc_feature (838)..(838): n is a, c, g, or t
  misc_feature (843)..(844): n is a, c, g, or t
  misc_feature (850)..(850): n is a, c, g, or t
  misc_feature (856)..(856): n is a, c, g, or t
  misc_feature (862)..(862): n is a, c, g, or t
  misc_feature (871)..(871): n is a, c, g, or t
  misc_feature (873)..(873): n is a, c, g, or t
  misc_feature (875)..(876): n is a, c, g, or t
  misc_feature (878)..(879): n is a, c, g, or t
  misc_feature (882)..(882): n is a, c, g, or t
  misc_feature (884)..(884): n is a, c, g, or t
  misc_feature (887)..(887): n is a, c, g, or t
  misc_feature (896)..(896): n is a, c, g, or t
  misc_feature (898)..(898): n is a, c, g, or t
  misc_feature (907)..(907): n is a, c, g, or t
  misc_feature (913)..(913): n is a, c, g, or t
  misc_feature (916)..(917): n is a, c, g, or t
  misc_feature (919)..(920): n is a, c, g, or t
  misc_feature (922)..(922): n is a, c, g, or t
  misc_feature (930)..(930): n is a, c, g, or t
  misc_feature (938)..(938): n is a, c, g, or t
  misc_feature (946)..(946): n is a, c, g, or t
  misc_feature (949)..(949): n is a, c, g, or t
  misc_feature (954)..(957): n is a, c, g, or t
  misc_feature (968)..(968): n is a, c, g, or t
  misc_feature (970)..(971): n is a, c, g, or t
  misc_feature (973)..(974): n is a, c, g, or t
  misc_feature (977)..(977): n is a, c, g, or t
  misc_feature (980)..(982): n is a, c, g, or t
  misc_feature (985)..(986): n is a, c, g, or t
  misc_feature (989)..(990): n is a, c, g, or t
  misc_feature (994)..(995): n is a, c, g, or t
  misc_feature (999)..(999): n is a, c, g, or t
  misc_feature (1001)..(1001): n is a, c, g, or t
  misc_feature (1003)..(1004): n is a, c, g, or t
  misc_feature (1007)..(1008): n is a, c, g, or t
  misc_feature (1010)..(1010): n is a, c, g, or t
  misc_feature (1014)..(1016): n is a, c, g, or t
  misc_feature (1024)..(1026): n is a, c, g, or t
  misc_feature (1030)..(1030): n is a, c, g, or t
  misc_feature (1032)..(1032): n is a, c, g, or t
  misc_feature (1035)..(1036): n is a, c, g, or t
  misc_feature (1039)..(1039): n is a, c, g, or t
  misc_feature (1041)..(1041): n is a, c, g, or t
  misc_feature (1045)..(1047): n is a, c, g, or t
  misc_feature (1049)..(1049): n is a, c, g, or t
  misc_feature (1052)..(1052): n is a, c, g, or t
  misc_feature (1054)..(1054): n is a, c, g, or t
  misc_feature (1056)..(1057): n is a, c, g, or t
  misc_feature (1062)..(1063): n is a, c, g, or t
  misc_feature (1065)..(1068): n is a, c, g, or t
  misc_feature (1070)..(1070): n is a, c, g, or t
  misc_feature (1072)..(1072): n is a, c, g, or t
  misc_feature (1076)..(1076): n is a, c, g, or t
  misc_feature (1078)..(1078): n is a, c, g, or t
  misc_feature (1085)..(1087): n is a, c, g, or t
  misc_feature (1093)..(1094): n is a, c, g, or t
  misc_feature (1096)..(1102): n is a, c, g, or t
  misc_feature (1105)..(1105): n is a, c, g, or t
  misc_feature (1107)..(1107): n is a, c, g, or t
  misc_feature (1112)..(1112): n is a, c, g, or t
  misc_feature (1114)..(1114): n is a, c, g, or t
  misc_feature (1116)..(1117): n is a, c, g, or t
  misc_feature (1121)..(1122): n is a, c, g, or t
  misc_feature (1126)..(1126): n is a, c, g, or t
  misc_feature (1128)..(1128): n is a, c, g, or t
  misc_feature (1130)..(1130): n is a, c, g, or t
  misc_feature (1132)..(1135): n is a, c, g, or t
  misc_feature (1137)..(1143): n is a, c, g, or t
  misc_feature (1145)..(1148): n is a, c, g, or t
  misc_feature (1150)..(1151): n is a, c, g, or t
  misc_feature (1154)..(1154): n is a, c, g, or t
  misc_feature (1158)..(1158): n is a, c, g, or t
  misc_feature (1161)..(1161): n is a, c, g, or t
  misc_feature (1168)..(1168): n is a, c, g, or t
  misc_feature (1170)..(1170): n is a, c, g, or t
  misc_feature (1172)..(1175): n is a, c, g, or t
  misc_feature (1180)..(1180): n is a, c, g, or t
  misc_feature (1184)..(1186): n is a, c, g, or t
  misc_feature (1189)..(1190): n is a, c, g, or t
  misc_feature (1194)..(1195): n is a, c, g, or t
  misc_feature (1197)..(1197): n is a, c, g, or t
  misc_feature (1199)..(1199): n is a, c, g, or t
  misc_feature (1202)..(1203): n is a, c, g, or t
  misc_feature (1205)..(1205): n is a, c, g, or t
  misc_feature (1207)..(1207): n is a, c, g, or t
  misc_feature (1209)..(1210): n is a, c, g, or t
  misc_feature (1213)..(1215): n is a, c, g, or t
  misc_feature (1219)..(1219): n is a, c, g, or t
  misc_feature (1221)..(1221): n is a, c, g, or t
  misc_feature (1225)..(1229): n is a, c, g, or t
  misc_feature (1231)..(1233): n is a, c, g, or t
  misc_feature (1236)..(1238): n is a, c, g, or t
  misc_feature (1241)..(1241): n is a, c, g, or t
  misc_feature (1243)..(1244): n is a, c, g, or t
  misc_feature (1246)..(1247): n is a, c, g, or t
  misc_feature (1249)..(1249): n is a, c, g, or t
  misc_feature (1252)..(1257): n is a, c, g, or t
  misc_feature (1259)..(1264): n is a, c, g, or t
  misc_feature (1266)..(1268): n is a, c, g, or t
  misc_feature (1270)..(1276): n is a, c, g, or t
  misc_feature (1278)..(1293): n is a, c, g, or t
  misc_feature (1295)..(1295): n is a, c, g, or t
  misc_feature (1297)..(1297): n is a, c, g, or t
  misc_feature (1300)..(1301): n is a, c, g, or t
  misc_feature (1304)..(1305): n is a, c, g, or t
  misc_feature (1307)..(1307): n is a, c, g, or t
  misc_feature (1309)..(1313): n is a, c, g, or t
  misc_feature (1315)..(1318): n is a, c, g, or t
  misc_feature (1322)..(1326): n is a, c, g, or t
  misc_feature (1328)..(1328): n is a, c, g, or t
  misc_feature (1331)..(1331): n is a, c, g, or t
  misc_feature (1333)..(1338): n is a, c, g, or t
  misc_feature (1340)..(1347): n is a, c, g, or t
  misc_feature (1349)..(1354): n is a, c, g, or t
  misc_feature (1357)..(1360): n is a, c, g, or t
  misc_feature (1362)..(1363): n is a, c, g, or t
  misc_feature (1365)..(1365): n is a, c, g, or t
  misc_feature (1369)..(1371): n is a, c, g, or t
  misc_feature (1373)..(1373): n is a, c, g, or t
  misc_feature (1376)..(1376): n is a, c, g, or t
  misc_feature (1378)..(1378): n is a, c, g, or t
  misc_feature (1380)..(1381): n is a, c, g, or t
tatagagaaattactatgagaggatcgcatcaccatcaccatcacggatcctatttaggtgacactatagaatcgtcgacccacgcgtccgcccacgcgtccggcatcgcatgcctacctggcctgccacgcggtgggcaacttccaggccccacttgcagagaagcccgcggccccggcccccgccaaggacgcgctgcgggccctgacgcagcggggccacgactcggtttatcagcagaataagtcggtgagcaccgacgagctggggcccccagggcggctggagggcgcgccccggcccgtggcccgcgagaagacctcgctgggcagcctgaagcgcgccagcgtggacgtggacctgctggccccgcgcagccccatggccaaggagaacatggtgaccttcagccacacgctgcccagggccagcgcgccctcgctggacgaccccgcgcgccgccacatgaccatccacgtgccgctggacgcctcgcgctccaagcagctcatcagcgagtggaagcagaagancctggagggccgcggcctggggctgcccgacgacgccagccccgggcacctgcgcgcgcccgccgaacccatggcggaggangaggaagaggaggaggacgaanaggaanaggaggaggaggaataggaggaggacgagggcccggncccgccctcgctctacnccancgtgcaggcgcggccggggttggngcctcgggtcatccttcccaccncgcgcnggggncgccgccgntggtgcaanatcccgnnaagaaggcncgtaaataggggnccngcctgtnncccaaaancggcnccnggnttgcnngccaantggttnatgatngacaaaaanancnngnnggnantgnaaaaacctncnggctgctgnaagtcnttnncnntnttcaaagnttccgggngccccggnccnaaagnnnnctaaaattgantnntnnttnatnnncannttnnaatnntctntnannttnntntttnnnttttaaannntaantnctnnaanantttnnnanttnanannaaaanntnnnntntnattncntttttannntttaannannnnnnnaancnatatnanannaaanntttntntntnnnntnnnnnnntnnnntnnaantttnatnaaatatnanannnnatttntttnnnaanntttnnananatnntntntnnatnnntttntnaatnnnnntnnnttnnnaananntnnanttnnnnnntnnnnnnannnannnnnnnannnnnnnnnnnnnnnntntnttnnttnntntnnnnntnnnntttnnnnntnttntnnnnnnannnnnnnnannnnnntannnnanntntttnnntnttntntnnttt

SEQ ID NO: 469 - DNA, 1447 bp, Homo Sapiens
  misc_feature (734)..(734): n is a, c, g, or t
  misc_feature (771)..(771): n is a, c, g, or t
  misc_feature (776)..(776): n is a, c, g, or t
  misc_feature (780)..(780): n is a, c, g, or t
  misc_feature (833)..(833): n is a, c, g, or t
  misc_feature (837)..(837): n is a, c, g, or t
  misc_feature (880)..(880): n is a, c, g, or t
  misc_feature (888)..(888): n is a, c, g, or t
  misc_feature (890)..(890): n is a, c, g, or t
  misc_feature (896)..(896): n is a, c, g, or t
  misc_feature (909)..(909): n is a, c, g, or t
  misc_feature (921)..(921): n is a, c, g, or t
  misc_feature (930)..(930): n is a, c, g, or t
  misc_feature (935)..(935): n is a, c, g, or t
  misc_feature (940)..(940): n is a, c, g, or t
  misc_feature (947)..(947): n is a, c, g, or t
  misc_feature (957)..(957): n is a, c, g, or t
  misc_feature (963)..(963): n is a, c, g, or t
  misc_feature (984)..(984): n is a, c, g, or t
  misc_feature (988)..(988): n is a, c, g, or t
  misc_feature (996)..(996): n is a, c, g, or t
  misc_feature (1008)..(1008): n is a, c, g, or t
  misc_feature (1016)..(1018): n is a, c, g, or t
  misc_feature (1022)..(1022): n is a, c, g, or t
  misc_feature (1024)..(1025): n is a, c, g, or t
  misc_feature (1038)..(1038): n is a, c, g, or t
  misc_feature (1043)..(1043): n is a, c, g, or t
  misc_feature (1053)..(1053): n is a, c, g, or t
  misc_feature (1068)..(1068): n is a, c, g, or t
  misc_feature (1082)..(1082): n is a, c, g, or t
  misc_feature (1084)..(1084): n is a, c, g, or t
  misc_feature (1086)..(1086): n is a, c, g, or t
  misc_feature (1093)..(1094): n is a, c, g, or t
  misc_feature (1105)..(1106): n is a, c, g, or t
  misc_feature (1122)..(1122): n is a, c, g, or t
  misc_feature (1127)..(1127): n is a, c, g, or t
  misc_feature (1130)..(1130): n is a, c, g, or t
  misc_feature (1136)..(1136): n is a, c, g, or t
  misc_feature (1139)..(1139): n is a, c, g, or t
  misc_feature (1143)..(1144): n is a, c, g, or t
  misc_feature (1151)..(1151): n is a, c, g, or t
  misc_feature (1156)..(1156): n is a, c, g, or t
  misc_feature (1158)..(1159): n is a, c, g, or t
  misc_feature (1163)..(1163): n is a, c, g, or t
  misc_feature (1169)..(1169): n is a, c, g, or t
  misc_feature (1171)..(1171): n is a, c, g, or t
  misc_feature (1179)..(1180): n is a, c, g, or t
  misc_feature (1183)..(1186): n is a, c, g, or t
  misc_feature (1190)..(1190): n is a, c, g, or t
  misc_feature (1192)..(1192): n is a, c, g, or t
  misc_feature (1196)..(1197): n is a, c, g, or t
  misc_feature (1199)..(1199): n is a, c, g, or t
  misc_feature (1202)..(1203): n is a, c, g, or t
  misc_feature (1212)..(1213): n is a, c, g, or t
  misc_feature (1215)..(1215): n is a, c, g, or t
  misc_feature (1219)..(1219): n is a, c, g, or t
  misc_feature (1224)..(1224): n is a, c, g, or t
  misc_feature (1227)..(1229): n is a, c, g, or t
  misc_feature (1231)..(1232): n is a, c, g, or t
  misc_feature (1238)..(1238): n is a, c, g, or t
  misc_feature (1240)..(1240): n is a, c, g, or t
  misc_feature (1244)..(1246): n is a, c, g, or t
  misc_feature (1258)..(1259): n is a, c, g, or t
  misc_feature (1261)..(1261): n is a, c, g, or t
  misc_feature (1263)..(1263): n is a, c, g, or t
  misc_feature (1270)..(1270): n is a, c, g, or t
  misc_feature (1273)..(1274): n is a, c, g, or t
  misc_feature (1280)..(1280): n is a, c, g, or t
  misc_feature (1282)..(1282): n is a, c, g, or t
  misc_feature (1285)..(1286): n is a, c, g, or t
  misc_feature (1288)..(1288): n is a, c, g, or t
  misc_feature (1290)..(1290): n is a, c, g, or t
  misc_feature (1292)..(1292): n is a, c, g, or t
  misc_feature (1296)..(1299): n is a, c, g, or t
  misc_feature (1302)..(1302): n is a, c, g, or t
  misc_feature (1306)..(1306): n is a, c, g, or t
  misc_feature (1308)..(1308): n is a, c, g, or t
  misc_feature (1312)..(1312): n is a, c, g, or t
  misc_feature (1315)..(1316): n is a, c, g, or t
  misc_feature (1318)..(1319): n is a, c, g, or t
  misc_feature (1322)..(1322): n is a, c, g, or t
  misc_feature (1324)..(1325): n is a, c, g, or t
  misc_feature (1331)..(1331): n is a, c, g, or t
  misc_feature (1333)..(1335): n is a, c, g, or t
  misc_feature (1339)..(1339): n is a, c, g, or t
  misc_feature (1341)..(1342): n is a, c, g, or t
  misc_feature (1346)..(1350): n is a, c, g, or t
  misc_feature (1354)..(1354): n is a, c, g, or t
  misc_feature (1357)..(1362): n is a, c, g, or t
  misc_feature (1364)..(1364): n is a, c, g, or t
  misc_feature (1374)..(1374): n is a, c, g, or t
  misc_feature (1376)..(1376): n is a, c, g, or t
  misc_feature (1379)..(1384): n is a, c, g, or t
  misc_feature (1387)..(1396): n is a, c, g, or t
  misc_feature (1399)..(1399): n is a, c, g, or t
  misc_feature (1401)..(1409): n is a, c, g, or t
  misc_feature (1411)..(1424): n is a, c, g, or t
  misc_feature (1426)..(1428): n is a, c, g, or t
  misc_feature (1431)..(1431): n is a, c, g, or t
  misc_feature (1434)..(1434): n is a, c, g, or t
  misc_feature (1437)..(1442): n is a, c, g, or t
  misc_feature (1444)..(1447): n is a, c, g, or t
tagagagaattactatgagaggatcgcatcaccatcaccatcacggatcctatttaggtgacactatagaatcgtcgacccacgcgtccgcggacctcgtcctccccctgcacggatgccgacggccgggcccctccccgacaagcctcccagggccccggcaccccggtcggcagcctgcccctgtgagacccaccctcccgagcggccaatcgcatttgagtccttatttggcacagagacggaagcacgtgtgtgccgttttaggaaaagaacaaaaaagacacaaacaaaccaaccagagggagaagagcccctgcccactgcactctttggttctctgctgtgcctgcctgtgtcctgaggaagaagccaggctgttcgcggtggcctctggggacctgagccccgggggccccatcggcctgcagaggggacggctgggatcccgagcaactctgcctccatccacgtgggaagcggaccctcctgccctcagcttgggtttgggggcctcagtgcaggacatctggcctgaacatcgactgtggggacagccctcgccctgccaagcactgcggccactcagcagctatgttcccgccgcagtggggccctgacgcccacctcccaggtgcccctcgagcaaaaacctctggcgcctccaatccagacccaccacagctggagggccaggcctcctcttccccaggctgccacccacgctggcgganctcagggctggggacttgtccttctcttccaacgtangccantcancaactggcatggagggcccaaggcaacggaaaacgtttttctccatggcaagnacanaacgggaaggccgggccttggggccacaggaaaaccagctcanggcggaangntcaggntccccgccccctnccacgtggaaanatggcctanggggncaagnccggctnccaaaggganttttcntttaaggatgggtgtggaatntccncccccctnttttttgttttnaatgaagnnnatgntnncccaaagaagggnaaaanaaaaattttntttccaaatcatcancctccaaaaagggnancnttcccannggggggaaatnnacccaaaaatggcccnggggnaantttttnggncccnnttgcctnaaaangnngttnggttgnangccaaaannttnnnnaaantncccnncntgnnttttcccannancctnaaaanggnnntnnttgggnanggtnnngggaaacccccnntncnaaatttnccnnaatttnanaanngnangnaaannnnccntttngnaaanttnntnnaantnnaaaaangnnngggntnnaaannnnnaaanccnnnnnngntttttttttntnaannnnnnaannnnnnnnnnttntnnnnnnnnntnnnnnnnnnnnnnnannnttnttnaannnnnncnnnn

SEQ ID NO: 470 - DNA, 1423 bp, Homo Sapiens
  misc_feature (800)..(800): n is a, c, g, or t
  misc_feature (873)..(873): n is a, c, g, or t
  misc_feature (884)..(884): n is a, c, g, or t
  misc_feature (906)..(906): n is a, c, g, or t
  misc_feature (918)..(918): n is a, c, g, or t
  misc_feature (932)..(932): n is a, c, g, or t
  misc_feature (936)..(936): n is a, c, g, or t
  misc_feature (962)..(962): n is a, c, g, or t
  misc_feature (966)..(966): n is a, c, g, or t
  misc_feature (968)..(968): n is a, c, g, or t
  misc_feature (977)..(977): n is a, c, g, or t
  misc_feature (984)..(984): n is a, c, g, or t
  misc_feature (992)..(992): n is a, c, g, or t
  misc_feature (999)..(999): n is a, c, g, or t
  misc_feature (1001)..(1001): n is a, c, g, or t
  misc_feature (1008)..(1008): n is a, c, g, or t
  misc_feature (1021)..(1021): n is a, c, g, or t
  misc_feature (1028)..(1028): n is a, c, g, or t
  misc_feature (1037)..(1038): n is a, c, g, or t
  misc_feature (1043)..(1043): n is a, c, g, or t
  misc_feature (1046)..(1046): n is a, c, g, or t
  misc_feature (1049)..(1049): n is a, c, g, or t
  misc_feature (1051)..(1051): n is a, c, g, or t
  misc_feature (1065)..(1065): n is a, c, g, or t
  misc_feature (1067)..(1067): n is a, c, g, or t
  misc_feature (1080)..(1080): n is a, c, g, or t
  misc_feature (1089)..(1089): n is a, c, g, or t
  misc_feature (1094)..(1094): n is a, c, g, or t
  misc_feature (1103)..(1103): n is a, c, g, or t
  misc_feature (1110)..(1110): n is a, c, g, or t
  misc_feature (1115)..(1115): n is a, c, g, or t
  misc_feature (1117)..(1117): n is a, c, g, or t
  misc_feature (1137)..(1137): n is a, c, g, or t
  misc_feature (1157)..(1157): n is a, c, g, or t
  misc_feature (1163)..(1163): n is a, c, g, or t
  misc_feature (1169)..(1169): n is a, c, g, or t
  misc_feature (1178)..(1180): n is a, c, g, or t
  misc_feature (1195)..(1195): n is a, c, g, or t
  misc_feature (1230)..(1230): n is a, c, g, or t
  misc_feature (1234)..(1234): n is a, c, g, or t
  misc_feature (1239)..(1240): n is a, c, g, or t
  misc_feature (1254)..(1254): n is a, c, g, or t
  misc_feature (1265)..(1266): n is a, c, g, or t
  misc_feature (1268)..(1269): n is a, c, g, or t
  misc_feature (1289)..(1289): n is a, c, g, or t
  misc_feature (1294)..(1294): n is a, c, g, or t
  misc_feature (1296)..(1296): n is a, c, g, or t
  misc_feature (1300)..(1300): n is a, c, g, or t
  misc_feature (1302)..(1302): n is a, c, g, or t
  misc_feature (1305)..(1305): n is a, c, g, or t
  misc_feature (1315)..(1315): n is a, c, g, or t
  misc_feature (1318)..(1318): n is a, c, g, or t
  misc_feature (1320)..(1320): n is a, c, g, or t
  misc_feature (1330)..(1333): n is a, c, g, or t
  misc_feature (1336)..(1336): n is a, c, g, or t
  misc_feature (1346)..(1346): n is a, c, g, or t
  misc_feature (1349)..(1349): n is a, c, g, or t
  misc_feature (1351)..(1352): n is a, c, g, or t
  misc_feature (1356)..(1359): n is a, c, g, or t
  misc_feature (1361)..(1361): n is a, c, g, or t
  misc_feature (1364)..(1366): n is a, c, g, or t
  misc_feature (1372)..(1372): n is a, c, g, or t
  misc_feature (1376)..(1376): n is a, c, g, or t
  misc_feature (1380)..(1380): n is a, c, g, or t
  misc_feature (1382)..(1382): n is a, c, g, or t
  misc_feature (1392)..(1393): n is a, c, g, or t
  misc_feature (1399)..(1399): n is a, c, g, or t
  misc_feature (1407)..(1407): n is a, c, g, or t
  misc_feature (1413)..(1413): n is a, c, g, or t
  misc_feature (1418)..(1418): n is a, c, g, or t
  misc_feature (1421)..(1421): n is a, c, g, or t
tagagagattactatgagaggatcgcatcaccatcaccatcacggatcctatttaggtgacactatagaatcgtcgacccacgcgtccggcaaaaacaagaactcactctcaggattgagtattgatgaaattgtccaaagagtgacagaacacattctagatgaacagaaaaagaaaaagccaaacccaggaaaggacaagaggacttatgagcccagctctgccacccccgtgaccaggtcctcccagggctcaccctcggtggttgttgcaccatcacccaaaaccaaggggcagaaagcagaagatgtccctgtgaggattgcactgggtgcaagttcctgtgaaatatgccacgaggtgttcaaatcaaaaaacgtgcgtgtgctcaaatgtgggcacaagtatcacaaagggtgctttaagcagtggcttaaagggcagagcgcttgcccggcctgccagggtcgtgatctcctgacagaagagtcaccttctggaagaggctggcccagtcagaatcaggagctgccttcctgctcttctaggtagtcacacttcactaaagtgtcatccaccagtgtgttgaatccgaagaatgacaattttctaccactggtgtaaaaaacaaacatttgaagacccttgtgcattgtgtgtcacaaagctaaatacatggaaatcgttaatatcgttgatattaagtaatttccccactctgagtgaatactttgatgattgccaacagtggctaataaaatgacggctaccacactcatgggtcactggggctgcgcanggctctttgaggtgggtggcttcttttggaaagtactatgaacgtctcgaagcagtattctagtgataaaaantcttaacatanccaagcgcccccacgtttgttnccccacgttttnttcccccttttctngttngaaaaacctgtttctggtaacctccncaananagaatgaanactgacntttttaanttttttnanaaaagtntgttttcctgaantgccctnaatttttcnnccaanatntgncnttttaagggtgggncnttaaccaaccaanttttaaaantttanagttaaggntaaaaantttgncngaattaaaccaaaaaattcnaatcccccttttgggaaaancccccnggcttngatttttannnatttaggtccccccnaaaaattgtttaaaggttgctttttcccttttaanaggnaccgnntttcaaaacctaanctttttattanntnnaaaaaatttttcccggaaanaaggngnttcntnccnccccgggggncgncntttaaacccnnnnccnaaaatttttnttngnnaaannnngnttnnncccccncggnaaananggttgggaanncccctncccccccnaaaaanttttnacngt

SEQ ID NO: 471 - DNA, 1391 bp, Homo Sapiens
  misc_feature (294)..(294): n is a, c, g, or t
  misc_feature (800)..(800): n is a, c, g, or t
  misc_feature (802)..(802): n is a, c, g, or t
  misc_feature (806)..(807): n is a, c, g, or t
  misc_feature (811)..(811): n is a, c, g, or t
  misc_feature (837)..(837): n is a, c, g, or t
  misc_feature (860)..(860): n is a, c, g, or t
  misc_feature (865)..(865): n is a, c, g, or t
  misc_feature (875)..(875): n is a, c, g, or t
  misc_feature (882)..(882): n is a, c, g, or t
  misc_feature (890)..(892): n is a, c, g, or t
  misc_feature (942)..(942): n is a, c, g, or t
  misc_feature (973)..(973): n is a, c, g, or t
  misc_feature (978)..(978): n is a, c, g, or t
  misc_feature (984)..(984): n is a, c, g, or t
  misc_feature (995)..(995): n is a, c, g, or t
  misc_feature (999)..(999): n is a, c, g, or t
  misc_feature (1004)..(1004): n is a, c, g, or t
  misc_feature (1012)..(1012): n is a, c, g, or t
  misc_feature (1040)..(1040): n is a, c, g, or t
  misc_feature (1047)..(1048): n is a, c, g, or t
  misc_feature (1055)..(1056): n is a, c, g, or t
  misc_feature (1065)..(1067): n is a, c, g, or t
  misc_feature (1071)..(1071): n is a, c, g, or t
  misc_feature (1086)..(1086): n is a, c, g, or t
  misc_feature (1088)..(1088): n is a, c, g, or t
  misc_feature (1090)..(1090): n is a, c, g, or t
  misc_feature (1093)..(1095): n is a, c, g, or t
  misc_feature (1098)..(1099): n is a, c, g, or t
  misc_feature (1105)..(1105): n is a, c, g, or t
  misc_feature (1108)..(1108): n is a, c, g, or t
  misc_feature (1111)..(1111): n is a, c, g, or t
  misc_feature (1114)..(1114): n is a, c, g, or t
  misc_feature (1118)..(1118): n is a, c, g, or t
  misc_feature (1120)..(1120): n is a, c, g, or t
  misc_feature (1126)..(1126): n is a, c, g, or t
  misc_feature (1129)..(1129): n is a, c, g, or t
  misc_feature (1131)..(1131): n is a, c, g, or t
  misc_feature (1134)..(1134): n is a, c, g, or t
  misc_feature (1136)..(1136): n is a, c, g, or t
  misc_feature (1143)..(1143): n is a, c, g, or t
  misc_feature (1147)..(1147): n is a, c, g, or t
  misc_feature (1159)..(1160): n is a, c, g, or t
  misc_feature (1175)..(1175): n is a, c, g, or t
  misc_feature (1179)..(1179): n is a, c, g, or t
  misc_feature (1183)..(1183): n is a, c, g, or t
  misc_feature (1185)..(1186): n is a, c, g, or t
  misc_feature (1188)..(1188): n is a, c, g, or t
  misc_feature (1192)..(1192): n is a, c, g, or t
  misc_feature (1195)..(1195): n is a, c, g, or t
  misc_feature (1198)..(1199): n is a, c, g, or t
  misc_feature (1201)..(1201): n is a, c, g, or t
  misc_feature (1207)..(1207): n is a, c, g, or t
  misc_feature (1228)..(1228): n is a, c, g, or t
  misc_feature (1234)..(1235): n is a, c, g, or t
  misc_feature (1237)..(1237): n is a, c, g, or t
  misc_feature (1239)..(1239): n is a, c, g, or t
  misc_feature (1249)..(1249): n is a, c, g, or t
  misc_feature (1251)..(1251): n is a, c, g, or t
  misc_feature (1253)..(1254): n is a, c, g, or t
  misc_feature (1257)..(1257): n is a, c, g, or t
  misc_feature (1260)..(1261): n is a, c, g, or t
  misc_feature (1263)..(1263): n is a, c, g, or t
  misc_feature (1267)..(1267): n is a, c, g, or t
  misc_feature (1271)..(1271): n is a, c, g, or t
  misc_feature (1275)..(1275): n is a, c, g, or t
  misc_feature (1279)..(1281): n is a, c, g, or t
  misc_feature (1284)..(1284): n is a, c, g, or t
  misc_feature (1289)..(1289): n is a, c, g, or t
  misc_feature (1310)..(1310): n is a, c, g, or t
  misc_feature (1312)..(1315): n is a, c, g, or t
  misc_feature (1317)..(1317): n is a, c, g, or t
  misc_feature (1322)..(1322): n is a, c, g, or t
  misc_feature (1329)..(1329): n is a, c, g, or t
  misc_feature (1331)..(1331): n is a, c, g, or t
  misc_feature (1333)..(1334): n is a, c, g, or t
  misc_feature (1339)..(1339): n is a, c, g, or t
  misc_feature (1342)..(1342): n is a, c, g, or t
  misc_feature (1346)..(1346): n is a, c, g, or t
  misc_feature (1354)..(1354): n is a, c, g, or t
  misc_feature (1358)..(1358): n is a, c, g, or t
  misc_feature (1361)..(1365): n is a, c, g, or t
  misc_feature (1369)..(1371): n is a, c, g, or t
  misc_feature (1373)..(1373): n is a, c, g, or t
  misc_feature (1382)..(1382): n is a, c, g, or t
  misc_feature (1386)..(1387): n is a, c, g, or t
  misc_feature (1391)..(1391): n is a, c, g, or t
aaaaaagagaaattactatgagaggatcgcatcaccatcaccatcacggatcctatttaggtgacactatagaatcgtcgacccacgcgtccggggcagcacaggaggcccgtcctcggggggctgcgcacatcacgctccttgccgggcgtccggcacagctgcggtcaccaaagcaggtgctggccctcggacctgagagcccagccagggcccatgtggtctgcaaatgggagcggctgtttttgaacacggggtcattctgcagtcaggacgaaccggtccccgtcgcanacggagtgcacgtgccctgcgccacatcctcacgctcggtggagggacgcgtgcggcgggacggtgcctacgggtacttgcagctgtgtcccatgtggcatcccagagctgcgccctgctggtctctgtgagcgccacgctgctgtgctggaaatgccgctttaaaaagggataccgtgggactctgcccgtctctttcataacgcaatatttatttgtattgggtgacgattgattctttcgacctaacattttgggttttaaccaaataaccggtccaggagtgagcagctccgttctgtcagatgctactccaaatgttaccagaacgatgacaaaaggggagacgctctattttttcacagttaaatgacagttgtagattgatacgcagttgtgcatgggaaggggaaacgcacagctttatttactgtaaagtggaatttcaggaaggcttgtgtgaaccgttgcgcataaataaaccctttctaccggttaaaaaaaananaaannaaanaaaaaaagggcggccgctccctatantgagtcgtattaagcttaattanctgancttggactcntgttganaaatccannnaatgaccctcaaaactccattctggatttgttcaaaaccctcggttgccnccgggcgttttttattggtgaaaatccaaanctaancttggngaaaatttccngganctaanggaaactnaaaatggaaaaaaaaatccctgggaaanacccccnnttaaaanntcccaaggnnntctnaaaaaaaatttttangnanttnnntcnnttgctnaanganctnaaancnaaaccnttnanctngnaattaangccnttttaaaaaacnnaaaaaaaaaaaaccnaaantttntnncnggcnttnttnnantttttnccccctaaaaaaagccccccnaaattnnangnaaaaaaaaangnannggnaanngnaaantttncccntttnnnccnttttntaaaaaaaaaaaatttttccncnnnnanaaaancaaaaantncnnatttnaanaaanttaaaaangggngtnnnnnaaannncntttccaagntttnnaaan

SEQ ID NO: 472 - DNA, 1226 bp, Homo Sapiens
  misc_feature (863)..(954): n is a, c, g, or t
  misc_feature (958)..(1006): n is a, c, g, or t
  misc_feature (1008)..(1021): n is a, c, g, or t
  misc_feature (1023)..(1039): n is a, c, g, or t
  misc_feature (1042)..(1051): n is a, c, g, or t
  misc_feature (1055)..(1069): n is a, c, g, or t
  misc_feature (1073)..(1177): n is a, c, g, or t
  misc_feature (1180)..(1224): n is a, c, g, or t
tagagaaattactatgagaggatcgcatcaccatcaccatcacggatcctatttaggtgacactatagaatcgtcgacccacgcgtccggtgagaacgtgttcaaggtctgtgacgagccccacccactgctggtaaaggagatgatccagcactgtgtgaatgccaacattgacgaagcctacaagattcttgctcacttgtggcatctgggctactcaccagaagatatcattggcaacatctttcgagtgtgtaaaactttccaaatggcagaatacctgaaactggagtttatcaaggaaattggatacactcacatgaaaatagcggaaggagtgaactctcttttgcagatggcaggcctcctggcaaggctgtgtcagaagacaatggccccggtggccagttagagcagagacttcactgactgacttacaggtgccctattctgaggtacaggagccgcggctttctgatgggggaaaatgccgccttaggctggagccaacatgactgtcctttaaactctagtggctggccaggcacggtagctcacgcctgtaatcccaacactttgggaggccgaggcaggtggatcacctgaggtcagaagttcaagaccagcctggccaacatggggaaaccctgtctttactaaaaatataaaaattagctgggtgtggtggcgggcacctgtaatcccagctactcgggaggctgtggcaggagaatcgcttgaacccaggaggtggaggttgcagtgagccaagatcacgccattgcactccagcctggggcgacagagtctccatctggggaaaaaaaattaaataaaataaactcccgtgacttgtaaaaaannnnnnnnnnnnnnnnnnnnnnnnnnnnnnnnnnnnnnnnnnnnnnnnnnnnnnnnnnnnnnnnnnnnnnnnnnnnnnnnnnnnnnnnnnnncccnnnnnnnnnnnnnnnnnnnnnnnnnnnnnnnnnnnnnnnnnnnnnnnnnannnnnnnnnnnnnncnnnnnnnnnnnnnnnnnttnnnnnnnnnntttnnnnnnnnnnnnnnntttnnnnnnnnnnnnnnnnnnnnnnnnnnnnnnnnnnnnnnnnnnnnnnnnnnnnnnnnnnnnnnnnnnnnnnnnnnnnnnnnnnnnnnnnnnnnnnnnnnnnnnnnnttnnnnnnnnnnnnnnnnnnnnnnnnnnnnnnnnnnnnnnnnnnnnnaa

SEQ ID NO: 473 - DNA, 1366 bp, Homo Sapiens
  misc_feature (1)..(1): n is a, c, g, or t
  misc_feature (824)..(824): n is a, c, g, or t
  misc_feature (827)..(827): n is a, c, g, or t
  misc_feature (846)..(846): n is a, c, g, or t
  misc_feature (896)..(896): n is a, c, g, or t
  misc_feature (925)..(925): n is a, c, g, or t
  misc_feature (927)..(927): n is a, c, g, or t
  misc_feature (940)..(940): n is a, c, g, or t
  misc_feature (968)..(968): n is a, c, g, or t
  misc_feature (970)..(970): n is a, c, g, or t
  misc_feature (988)..(988): n is a, c, g, or t
  misc_feature (1002)..(1002): n is a, c, g, or t
  misc_feature (1009)..(1010): n is a, c, g, or t
  misc_feature (1015)..(1015): n is a, c, g, or t
  misc_feature (1023)..(1023): n is a, c, g, or t
  misc_feature (1037)..(1037): n is a, c, g, or t
  misc_feature (1044)..(1044): n is a, c, g, or t
  misc_feature (1066)..(1066): n is a, c, g, or t
  misc_feature (1068)..(1068): n is a, c, g, or t
  misc_feature (1071)..(1071): n is a, c, g, or t
  misc_feature (1074)..(1074): n is a, c, g, or t
  misc_feature (1078)..(1078): n is a, c, g, or t
  misc_feature (1081)..(1082): n is a, c, g, or t
  misc_feature (1087)..(1087): n is a, c, g, or t
  misc_feature (1090)..(1090): n is a, c, g, or t
  misc_feature (1092)..(1092): n is a, c, g, or t
  misc_feature (1095)..(1095): n is a, c, g, or t
  misc_feature (1097)..(1098): n is a, c, g, or t
  misc_feature (1101)..(1102): n is a, c, g, or t
  misc_feature (1109)..(1111): n is a, c, g, or t
  misc_feature (1113)..(1113): n is a, c, g, or t
  misc_feature (1125)..(1127): n is a, c, g, or t
  misc_feature (1130)..(1131): n is a, c, g, or t
  misc_feature (1139)..(1139): n is a, c, g, or t
  misc_feature (1141)..(1141): n is a, c, g, or t
  misc_feature (1145)..(1146): n is a, c, g, or t
  misc_feature (1150)..(1150): n is a, c, g, or t
  misc_feature (1153)..(1153): n is a, c, g, or t
  misc_feature (1155)..(1156): n is a, c, g, or t
  misc_feature (1160)..(1162): n is a, c, g, or t
  misc_feature (1165)..(1166): n is a, c, g, or t
  misc_feature (1168)..(1168): n is a, c, g, or t
  misc_feature (1173)..(1173): n is a, c, g, or t
  misc_feature (1175)..(1177): n is a, c, g, or t
  misc_feature (1179)..(1180): n is a, c, g, or t
  misc_feature (1182)..(1184): n is a, c, g, or t
  misc_feature (1186)..(1187): n is a, c, g, or t
  misc_feature (1189)..(1190): n is a, c, g, or t
  misc_feature (1196)..(1197): n is a, c, g, or t
  misc_feature (1201)..(1202): n is a, c, g, or t
  misc_feature (1206)..(1206): n is a, c, g, or t
  misc_feature (1212)..(1215): n is a, c, g, or t
  misc_feature (1224)..(1224): n is a, c, g, or t
  misc_feature (1236)..(1236): n is a, c, g, or t
  misc_feature (1239)..(1240): n is a, c, g, or t
  misc_feature (1245)..(1247): n is a, c, g, or t
  misc_feature (1251)..(1254): n is a, c, g, or t
  misc_feature (1258)..(1258): n is a, c, g, or t
  misc_feature (1260)..(1366): n is a, c, g, or t
naattagagaaattactatgagaggatcgcatcaccatcaccatcacggatcctatttaggtgacactatagaatcgtcgacccacgcgtccgcccacgcgtccggctcctcggagggcttggaggctgaggactgggcccagggagtagtggaggccggtggcagcttcggggcttatggtgcccaggaggaagcccagtgccctactctgcatttcctggaaggtggggaggactctgattcagacagtgaggaagaggacgatgaggaagaggatgatgaagatgaagacgacgatgatgatgaggaggatggtgatgaggtgcctgtacccagctttggggaggccatggcttactttgccatggtcaagaggtacctgacctccttccccattgatgaccgcgtgcagagccacatcctccacttggaacacgatctggttcatgtgaccaggaagaaccacgccaggcaggcgggagttcgaggtcttggacatcaaagctgagtcactggacctagctgtgcccccaacctagattggcagcaccaccccagggcagaggactctctgggcacccgctgtgcatggagccagagtgcagagccccagatcctttagtaatgcttcccctggtcctgcaacaggcccggtcacctcggccgggcccggggctgaggtcagcctcactgcctgcttattgcctctttctcagaatcctctttcctccccatttggccctgggctcaggggaccaggtggggcgggtggggagctgtccggtgctaccacaccgtgccctcagtggactaaccacagcancanccagggatgggccctggangttcccggccggaaagtgcctctcccctctgccatccacgtcaggtcttnggtgggggggaccccaaagccattctggnanggctccaaaaaangtccagcctaggccccctgcaggctggnanccccaccccaccccccantccctttttctggncctgtcnngtgantttggccntggttttttttccnattggangtttccaaaagcccccccccgngnaantanccanggnnctttnttngnggnanntgnnggccccnnncntctccccccttnnnggnnggcccctncntggnnaaanggncnngggnnnggnncnaaaancnnncnncnnntnntnntttccnntttnntttnaaaaannnnccccccccnttttgggggggnaannttttnnncccnnnnaaanannnnnnnnnnnnnnnnnnnnnnnnnnnnnnnnnnnnnnnnnnnnnnnnnnnnnnnnnnnnnnnnnnnnnnnnnnnnnnnnnnnnnnnnnnnnnnnnnnnnnnnnnnn

SEQ ID NO: 474 - DNA, 1370 bp, Homo Sapiens
  misc_feature (711)..(714): n is a, c, g, or t
  misc_feature (716)..(716): n is a, c, g, or t
  misc_feature (719)..(798): n is a, c, g, or t
  misc_feature (800)..(809): n is a, c, g, or t
  misc_feature (822)..(822): n is a, c, g, or t
  misc_feature (824)..(824): n is a, c, g, or t
  misc_feature (829)..(830): n is a, c, g, or t
  misc_feature (835)..(835): n is a, c, g, or t
  misc_feature (838)..(840): n is a, c, g, or t
  misc_feature (842)..(842): n is a, c, g, or t
  misc_feature (847)..(847): n is a, c, g, or t
  misc_feature (856)..(856): n is a, c, g, or t
  misc_feature (871)..(871): n is a, c, g, or t
  misc_feature (877)..(877): n is a, c, g, or t
  misc_feature (885)..(885): n is a, c, g, or t
  misc_feature (889)..(889): n is a, c, g, or t
  misc_feature (896)..(896): n is a, c, g, or t
  misc_feature (904)..(905): n is a, c, g, or t
  misc_feature (917)..(917): n is a, c, g, or t
  misc_feature (923)..(923): n is a, c, g, or t
  misc_feature (925)..(925): n is a, c, g, or t
  misc_feature (941)..(941): n is a, c, g, or t
  misc_feature (955)..(955): n is a, c, g, or t
  misc_feature (965)..(965): n is a, c, g, or t
  misc_feature (985)..(985): n is a, c, g, or t
  misc_feature (991)..(991): n is a, c, g, or t
  misc_feature (993)..(994): n is a, c, g, or t
  misc_feature (997)..(997): n is a, c, g, or t
  misc_feature (1000)..(1000): n is a, c, g, or t
  misc_feature (1003)..(1003): n is a, c, g, or t
  misc_feature (1025)..(1025): n is a, c, g, or t
  misc_feature (1028)..(1028): n is a, c, g, or t
  misc_feature (1030)..(1030): n is a, c, g, or t
  misc_feature (1044)..(1045): n is a, c, g, or t
  misc_feature (1053)..(1053): n is a, c, g, or t
  misc_feature (1056)..(1056): n is a, c, g, or t
  misc_feature (1069)..(1069): n is a, c, g, or t
  misc_feature (1074)..(1074): n is a, c, g, or t
  misc_feature (1078)..(1078): n is a, c, g, or t
  misc_feature (1082)..(1082): n is a, c, g, or t
  misc_feature (1088)..(1089): n is a, c, g, or t
  misc_feature (1091)..(1091): n is a, c, g, or t
  misc_feature (1099)..(1100): n is a, c, g, or t
  misc_feature (1103)..(1103): n is a, c, g, or t
  misc_feature (1121)..(1122): n is a, c, g, or t
  misc_feature (1126)..(1126): n is a, c, g, or t
  misc_feature (1146)..(1146): n is a, c, g, or t
  misc_feature (1162)..(1162): n is a, c, g, or t
  misc_feature (1181)..(1181): n is a, c, g, or t
  misc_feature (1194)..(1194): n is a, c, g, or t
  misc_feature (1211)..(1211): n is a, c, g, or t
  misc_feature (1216)..(1216): n is a, c, g, or t
  misc_feature (1224)..(1225): n is a, c, g, or t
  misc_feature (1228)..(1230): n is a, c, g, or t
  misc_feature (1234)..(1234): n is a, c, g, or t
  misc_feature (1236)..(1237): n is a, c, g, or t
  misc_feature (1242)..(1242): n is a, c, g, or t
  misc_feature (1255)..(1255): n is a, c, g, or t
  misc_feature (1261)..(1261): n is a, c, g, or t
  misc_feature (1279)..(1279): n is a, c, g, or t
  misc_feature (1294)..(1294): n is a, c, g, or t
  misc_feature (1299)..(1299): n is a, c, g, or t
  misc_feature (1306)..(1306): n is a, c, g, or t
  misc_feature (1308)..(1310): n is a, c, g, or t
  misc_feature (1314)..(1314): n is a, c, g, or t
  misc_feature (1327)..(1328): n is a, c, g, or t
  misc_feature (1334)..(1334): n is a, c, g, or t
  misc_feature (1336)..(1336): n is a, c, g, or t
  misc_feature (1351)..(1351): n is a, c, g, or t
  misc_feature (1356)..(1356): n is a, c, g, or t
  misc_feature (1360)..(1360): n is a, c, g, or t
attagagagattactatgagaggatcgcatcaccatcaccatcacggatcctatttaggtgacactatagaatcgtcgacccacgcgtccgccatgaagttcaatcccttcgttacctcggaccgcagtaaaaaccgcaaacgtcacttcaatgccccctcacacgtgcgcaggaagatcatgtcatccccgctctccaaggagctgcggcagaagtacaatgtccgctccatgcccatccgcaaggacgacgaggtccaggtagttcgaggacactacaaaggtcagcaaattggcaaggtagtccaggtgtacagaaagaaatatgtcatctacatcgagcgggtgcagcgtgagaaggccaacggcacaactgtccacgtgggcattcacccaagcaaggtggttatcaccaggctaaaactggacaaggatcggaaaaaaattcttgaacgcaaagccaagtctcgacaagttggaaaagagaaaggcaaatataaagaagaacttattgagaaaatgcaggaataaatagaacctgttgtgcaaccacggtttaaccggagattttgaggctagggtgtgtttctttcgaacttttcggaatgtctggaacatttcatttcctgttttgttacctgtgcctctgtaaatctacttttgcaattttaagtaataattttatgaataaaaatgggaaatgcttcctannnnanaannnnnnnnnnnnnnnnnnnnnnnnnnnnnnnnnnnnnnnnnnnnnnnnnnnnnnnnnnnnnnnnnnnnnnnnnnnnnnnnannnnnnnnnnaaaaggggggccncnccctnnagggnggnnnantaaancttatttanctgactttggacccnttttgnaaaatccnaaangcccccnaacccccnntggtttttttcnaaaacncncggttggccccggggngtttttttttgggngaaaaacccnccttcctttgggaaattttnccgggncnntanggnacntaaatgggaaaaaaaacccccnggnanaacccccggttganntttcccanggnccccaaaaaaaantttgngggntttncccccnntngcccaggnnccnaaacccaaacggttcccnngaanttccgcctttttaaaaccgnaaaaaaaaaaacccantttttccggcttttttccnttttgcccccggnaaggccccccgaatttnttggnaaaaaaannggnnngggnanngaaangttcccctttttncctttnctgaaaaaaaaaattttntccttggggagaaancaaanttcgggntnnnaatnttccaaagggggnngggaancnccctttcccgggttngaaantttncccccccccg

SEQ ID NO: 475 - DNA, 1391 bp, Homo Sapiens
  misc_feature (744)..(744): n is a, c, g, or t
  misc_feature (886)..(886): n is a, c, g, or t
  misc_feature (913)..(913): n is a, c, g, or t
  misc_feature (929)..(930): n is a, c, g, or t
  misc_feature (945)..(945): n is a, c, g, or t
  misc_feature (948)..(948): n is a, c, g, or t
  misc_feature (956)..(956): n is a, c, g, or t
  misc_feature (971)..(971): n is a, c, g, or t
  misc_feature (976)..(976): n is a, c, g, or t
  misc_feature (1010)..(1010): n is a, c, g, or t
  misc_feature (1018)..(1018): n is a, c, g, or t
  misc_feature (1031)..(1031): n is a, c, g, or t
  misc_feature (1036)..(1036): n is a, c, g, or t
  misc_feature (1048)..(1048): n is a, c, g, or t
  misc_feature (1057)..(1057): n is a, c, g, or t
  misc_feature (1059)..(1059): n is a, c, g, or t
  misc_feature (1074)..(1074): n is a, c, g, or t
  misc_feature (1076)..(1077): n is a, c, g, or t
  misc_feature (1079)..(1079): n is a, c, g, or t
  misc_feature (1084)..(1084): n is a, c, g, or t
  misc_feature (1091)..(1091): n is a, c, g, or t
  misc_feature (1097)..(1097): n is a, c, g, or t
  misc_feature (1108)..(1108): n is a, c, g, or t
  misc_feature (1139)..(1142): n is a, c, g, or t
  misc_feature (1153)..(1153): n is a, c, g, or t
  misc_feature (1157)..(1157): n is a, c, g, or t
  misc_feature (1161)..(1161): n is a, c, g, or t
  misc_feature (1167)..(1167): n is a, c, g, or t
  misc_feature (1176)..(1176): n is a, c, g, or t
  misc_feature (1178)..(1178): n is a, c, g, or t
  misc_feature (1180)..(1180): n is a, c, g, or t
  misc_feature (1184)..(1184): n is a, c, g, or t
  misc_feature (1197)..(1197): n is a, c, g, or t
  misc_feature (1208)..(1208): n is a, c, g, or t
  misc_feature (1211)..(1212): n is a, c, g, or t
  misc_feature (1218)..(1218): n is a, c, g, or t
  misc_feature (1223)..(1223): n is a, c, g, or t
  misc_feature (1230)..(1230): n is a, c, g, or t
  misc_feature (1251)..(1251): n is a, c, g, or t
  misc_feature (1271)..(1271): n is a, c, g, or t
  misc_feature (1276)..(1276): n is a, c, g, or t
  misc_feature (1278)..(1278): n is a, c, g, or t
  misc_feature (1286)..(1287): n is a, c, g, or t
  misc_feature (1291)..(1291): n is a, c, g, or t
  misc_feature (1318)..(1319): n is a, c, g, or t
  misc_feature (1322)..(1323): n is a, c, g, or t
  misc_feature (1329)..(1329): n is a, c, g, or t
  misc_feature (1332)..(1332): n is a, c, g, or t
  misc_feature (1341)..(1341): n is a, c, g, or t
  misc_feature (1356)..(1356): n is a, c, g, or t
  misc_feature (1359)..(1359): n is a, c, g, or t
  misc_feature (1364)..(1364): n is a, c, g, or t
  misc_feature (1370)..(1370): n is a, c, g, or t
  misc_feature (1376)..(1376): n is a, c, g, or t
  misc_feature (1379)..(1379): n is a, c, g, or t
  misc_feature (1391)..(1391): n is a, c, g, or t
tagagaaattactatgagaggatcgcatcaccatcaccatcacggatcctatttaggtgacactatagaatcgtcgacccacgcgatccgatcgattggggccggggacgcggagcaggtggccgcggcggggcagctgggccgccagcttggtgcctcggggaccgtctcccgctgctttggtcaccagcccctgcccgcccgacccgctccgttctccggcctgcgagccctgccggccggactttgcgccgcgtccggcgctgctgctgcgctcggggccccgctcggcgccggcggtgaccgggaagcccgcgttaaaggggcaaccgggaccctggcccggtatggctgaagtcagcatcgaccagtccaagctgcctggagtcaaggaagtatgccgagattttgctgtcctggaggaccacaccctggctcacagcctgcaggaacaagagattgagcatcatttggcatcgaacgttcagcggaaccgtttggtccagcatgatctccaggtggctaagcagctccaagaggaagatctgaaagcgcaggcccagctccagaagcgctacaaagaccttgaacaacaagactgtgaaattgctcaggaaattcaggagaagctggctattgaggcagagagacgacgcattcaggagaagaaggatgaggacatagctcgccttttgcaagaaaaggagttacaggaagagaaaaagagaaagaaacactttccanagttccctgcaacccgtgcttatgcagatagttactattatgaagatggaggaatgaagccaagagtgatgaaagaagctgtatctactccatcacgaatggcccacagggatcaggaatggtatgatgctgaaattgccanaaaactgcaaagaaaaaaaatttttgnctacccaagtggaaannaaaagccgctcaaantanctcaaaangaaaaaatcgcttcnacttntaatggctgaaaaaaaaaaagcttaaaaaaaaancaaggaanggaaaaaatcatntttgnaaaaaaaaaaanaaaaccccnantggaaaccaaaaaananntnaagcnccaattncaagtncaaaaaaaaanaaaaactccccattttaaaaaggaaaggccnnnnggccccccccncttntctnaaaaangggaaaaancnantaancctttttaaaacnacaaattcccnggnnttttcnaaaanaaaaccnttaaaggttttttaaaaaatnaaaaaaaaatttctaaaaanaaccncnaaaaaatnngggnaaaaaaaaatccattattttttccggnntgnnccggantancccggtttnacaaaaatttttttnttnaagtntttttntaaacnggnaaaaaaaatttn

SEQ ID NO: 476 - DNA, 1372 bp, Homo Sapiens
  misc_feature (1)..(1): n is a, c, g, or t
  misc_feature (889)..(889): n is a, c, g, or t
  misc_feature (927)..(927): n is a, c, g, or t
  misc_feature (941)..(941): n is a, c, g, or t
  misc_feature (972)..(972): n is a, c, g, or t
  misc_feature (977)..(977): n is a, c, g, or t
  misc_feature (981)..(981): n is a, c, g, or t
  misc_feature (989)..(989): n is a, c, g, or t
  misc_feature (991)..(991): n is a, c, g, or t
  misc_feature (1012)..(1012): n is a, c, g, or t
  misc_feature (1019)..(1019): n is a, c, g, or t
  misc_feature (1030)..(1030): n is a, c, g, or t
  misc_feature (1036)..(1036): n is a, c, g, or t
  misc_feature (1062)..(1062): n is a, c, g, or t
  misc_feature (1080)..(1080): n is a, c, g, or t
  misc_feature (1095)..(1095): n is a, c, g, or t
  misc_feature (1098)..(1098): n is a, c, g, or t
  misc_feature (1111)..(1111): n is a, c, g, or t
  misc_feature (1120)..(1120): n is a, c, g, or t
  misc_feature (1122)..(1122): n is a, c, g, or t
  misc_feature (1130)..(1130): n is a, c, g, or t
  misc_feature (1133)..(1133): n is a, c, g, or t
  misc_feature (1139)..(1139): n is a, c, g, or t
  misc_feature (1141)..(1142): n is a, c, g, or t
  misc_feature (1150)..(1150): n is a, c, g, or t
  misc_feature (1157)..(1157): n is a, c, g, or t
  misc_feature (1162)..(1162): n is a, c, g, or t
  misc_feature (1166)..(1166): n is a, c, g, or t
  misc_feature (1181)..(1181): n is a, c, g, or t
  misc_feature (1185)..(1185): n is a, c, g, or t
  misc_feature (1191)..(1192): n is a, c, g, or t
  misc_feature (1206)..(1206): n is a, c, g, or t
  misc_feature (1214)..(1214): n is a, c, g, or t
  misc_feature (1216)..(1217): n is a, c, g, or t
  misc_feature (1220)..(1221): n is a, c, g, or t
  misc_feature (1224)..(1224): n is a, c, g, or t
  misc_feature (1229)..(1229): n is a, c, g, or t
  misc_feature (1236)..(1236): n is a, c, g, or t
  misc_feature (1238)..(1238): n is a, c, g, or t
  misc_feature (1241)..(1242): n is a, c, g, or t
  misc_feature (1251)..(1251): n is a, c, g, or t
  misc_feature (1253)..(1253): n is a, c, g, or t
  misc_feature (1255)..(1255): n is a, c, g, or t
  misc_feature (1258)..(1258): n is a, c, g, or t
  misc_feature (1279)..(1279): n is a, c, g, or t
  misc_feature (1283)..(1283): n is a, c, g, or t
  misc_feature (1286)..(1287): n is a, c, g, or t
  misc_feature (1292)..(1292): n is a, c, g, or t
  misc_feature (1303)..(1303): n is a, c, g, or t
  misc_feature (1331)..(1331): n is a, c, g, or t
  misc_feature (1338)..(1338): n is a, c, g, or t
ntatagagagattactatgagaggatcgcatcaccatcaccatcacggatcctatttaggtgacactatagaatcgtcgacccacgcgtccggatggctgctgggcgaccacttcctgacagaagaaaagatgtggagtgggctgctacctcctggcctaaatgaaagtgacgctgagtcaaactcggaagatgaagctacgttggagaactctggacttaacttacaggaagataaagaggatgagagcatcagaaaaacagaaatcatagatttctcaacagatgaaccaaaaactgaaacagagtcaaatgtaaatgcctatgaagagtgtccttctggaattcccatagatatgtggaataaatttcaagaattgcataaaaaacattctgaacagaaaagcacaacctcaagattcagagggaaaagaagaaaacgctccagaaaagataaattgaagaatgaaaaagaattacatagtgaaccgtcctcaaatgaaacccagtggaaagagcttactcagtattttggagtcaatgatagatttgacccgcctgttaaaaggaaaaaagttgagaagtcaggccttgaaaagaggatagaccaggctgtggaggagtggaatattgagaaggctgaggaactcagcaaccagctagctactcgagagcttggtgtaaaaattgccaaagcagttgcctgccacaactttgtaaaagccaaaaaggaggttgaaaattcacaggctgcccgaaaaaagaagaaacttgcatgggggtttgaagcaaagaagagatgggaaaccaaaagcaacatgggatacatgtaacttgccagagtgcttccagacatttgtagactccaatgctcaatttactgagaatgntttcctgcctatgttaatatgtcagaaaattgatagcnctaaacaaaaatangcataaaatttgggatttgattatcagctcntttcngtcnttctttangnctttgtcctattgaagtgaanaaatgangccttctgttntttgtntaagaaatgttggaaaaaaattttgnaagaagaggatggatttngtttttttgttgggnggnccctggaaaaaanccttttggncnttccctcnttngtttancnnccccgggngctcccnacttncttnttttttttttttttngaanaaaccnncttgtctgtccccnggttaagngnnaannaantttgnttccggnanccnngttctgggntnanggntcccccccccccccccggaangggnatnngaaangcccccccccngcttttttttttttttttttaaaaaaanttttggngggggggggtaccccccccaaattcccccccccc

SEQ ID NO: 477 - DNA, 1352 bp, Homo Sapiens
  misc_feature (933)..(933): n is a, c, g, or t
  misc_feature (948)..(948): n is a, c, g, or t
  misc_feature (959)..(959): n is a, c, g, or t
  misc_feature (976)..(976): n is a, c, g, or t
  misc_feature (979)..(979): n is a, c, g, or t
  misc_feature (982)..(982): n is a, c, g, or t
  misc_feature (998)..(998): n is a, c, g, or t
  misc_feature (1000)..(1000): n is a, c, g, or t
  misc_feature (1013)..(1013): n is a, c, g, or t
  misc_feature (1034)..(1034): n is a, c, g, or t
  misc_feature (1041)..(1041): n is a, c, g, or t
  misc_feature (1046)..(1046): n is a, c, g, or t
  misc_feature (1050)..(1050): n is a, c, g, or t
  misc_feature (1062)..(1062): n is a, c, g, or t
  misc_feature (1079)..(1079): n is a, c, g, or t
  misc_feature (1085)..(1085): n is a, c, g, or t
  misc_feature (1093)..(1093): n is a, c, g, or t
  misc_feature (1099)..(1099): n is a, c, g, or t
  misc_feature (1113)..(1113): n is a, c, g, or t
  misc_feature (1117)..(1117): n is a, c, g, or t
  misc_feature (1129)..(1130): n is a, c, g, or t
  misc_feature (1134)..(1134): n is a, c, g, or t
  misc_feature (1162)..(1162): n is a, c, g, or t
  misc_feature (1169)..(1169): n is a, c, g, or t
  misc_feature (1171)..(1171): n is a, c, g, or t
  misc_feature (1174)..(1174): n is a, c, g, or t
  misc_feature (1177)..(1177): n is a, c, g, or t
  misc_feature (1187)..(1187): n is a, c, g, or t
  misc_feature (1189)..(1189): n is a, c, g, or t
  misc_feature (1191)..(1191): n is a, c, g, or t
  misc_feature (1206)..(1208): n is a, c, g, or t
  misc_feature (1212)..(1212): n is a, c, g, or t
  misc_feature (1214)..(1214): n is a, c, g, or t
  misc_feature (1218)..(1218): n is a, c, g, or t
  misc_feature (1226)..(1227): n is a, c, g, or t
  misc_feature (1234)..(1234): n is a, c, g, or t
  misc_feature (1237)..(1238): n is a, c, g, or t
  misc_feature (1242)..(1243): n is a, c, g, or t
  misc_feature (1249)..(1249): n is a, c, g, or t
  misc_feature (1251)..(1254): n is a, c, g, or t
  misc_feature (1259)..(1259): n is a, c, g, or t
  misc_feature (1263)..(1263): n is a, c, g, or t
  misc_feature (1275)..(1275): n is a, c, g, or t
  misc_feature (1277)..(1278): n is a, c, g, or t
  misc_feature (1284)..(1284): n is a, c, g, or t
  misc_feature (1289)..(1289): n is a, c, g, or t
  misc_feature (1293)..(1294): n is a, c, g, or t
  misc_feature (1296)..(1297): n is a, c, g, or t
  misc_feature (1299)..(1299): n is a, c, g, or t
  misc_feature (1302)..(1302): n is a, c, g, or t
  misc_feature (1307)..(1309): n is a, c, g, or t
  misc_feature (1312)..(1312): n is a, c, g, or t
  misc_feature (1314)..(1315): n is a, c, g, or t
  misc_feature (1322)..(1322): n is a, c, g, or t
  misc_feature (1327)..(1327): n is a, c, g, or t
  misc_feature (1332)..(1332): n is a, c, g, or t
  misc_feature (1334)..(1334): n is a, c, g, or t
  misc_feature (1339)..(1340): n is a, c, g, or t
  misc_feature (1343)..(1347): n is a, c, g, or t
  misc_feature (1352)..(1352): n is a, c, g, or t
atagagaaattactatgagaggatcgcatcaccatcaccatcacggatcctatttaggtgacactatagaatcgtcgacccacgcgtccggtgacgagtcccgcgttctctccttgaatccactcgccagcccgccgccctctgccgccgcaccctgcacacccgcccctctcctgtgccaggaacttgctactaccagcaccatgccctaccaatatccagcactgaccccggagcagaagaaggagctgtctgacatcgctcaccgcatcgtggcacctggcaagggcatcctggctgcagatgagtccactgggagcattgccaagcggctgcagtccattggcaccgagaacaccgaggagaaccggcgcttctaccgccagctgctgctgacagctgacgaccgcgtgaacccctgcattgggggtgtcatcctcttccatgagacactctaccagaaggcggatgatgggcgtcccttcccccaagttatcaaatccaagggcggtgttgtgggcatcaaggtagacaagggcgtggtccccctggcagggacaaatggcgagactaccacccaagggttggatgggctgtctgagcgctgtgcccagtacaagaaggacggagctgacttcgccaagtggcgttgtgtgctgaagattggggaacacaccccctcagccctcgccatcatggaaaatgccaatgttctggcccgttatgccagtatctgccagcagaatggcattgtgcccatcgtggagcctgagatcctccctgatggggaccatgacttgaagcgctgccagtatgtgaccgagaaggtgctggctgctgtctacaaggctctgagtgaccaccacatctacctggaaggcaccttgctgaagccccaacatggtcaccccaggccatgcttgcactcaaaanttttctcatgagganattgccatggngaccgtcaagcgctgcnccncanagtgccccccgctgtnantgggatccctttntgtctggaagccaaaatgagnaagaagngtccntcancctcaatgccantaaaaagggccccctgnttaaanccttgggncctganctttttttaaggcnaaancctggaggcctnngccngaaggcctggggggggaaaaaaaaaacntgaaagntnccnagnagaaaatttnangnaacccttgccaaaannntttntntaangaaaaaannttccaanggnnaggnngggttntnnnnaaaantctntttttttaaacncnnaaaaangaggnttcnngnngnccnaaatnnnggncnncccttcnttttnaaaananccccnnggnnnnngtttn

SEQ ID NO: 478 - DNA, 1360 bp, Homo Sapiens
  misc_feature (871)..(871): n is a, c, g, or t
  misc_feature (917)..(917): n is a, c, g, or t
  misc_feature (971)..(971): n is a, c, g, or t
  misc_feature (1006)..(1007): n is a, c, g, or t
  misc_feature (1012)..(1012): n is a, c, g, or t
  misc_feature (1017)..(1017): n is a, c, g, or t
  misc_feature (1029)..(1029): n is a, c, g, or t
  misc_feature (1036)..(1036): n is a, c, g, or t
  misc_feature (1048)..(1049): n is a, c, g, or t
  misc_feature (1053)..(1054): n is a, c, g, or t
  misc_feature (1059)..(1059): n is a, c, g, or t
  misc_feature (1069)..(1069): n is a, c, g, or t
  misc_feature (1075)..(1075): n is a, c, g, or t
  misc_feature (1082)..(1082): n is a, c, g, or t
  misc_feature (1086)..(1086): n is a, c, g, or t
  misc_feature (1089)..(1091): n is a, c, g, or t
  misc_feature (1094)..(1094): n is a, c, g, or t
  misc_feature (1097)..(1097): n is a, c, g, or t
  misc_feature (1105)..(1106): n is a, c, g, or t
  misc_feature (1112)..(1112): n is a, c, g, or t
  misc_feature (1116)..(1116): n is a, c, g, or t
  misc_feature (1123)..(1123): n is a, c, g, or t
  misc_feature (1125)..(1125): n is a, c, g, or t
  misc_feature (1129)..(1129): n is a, c, g, or t
  misc_feature (1131)..(1132): n is a, c, g, or t
  misc_feature (1135)..(1135): n is a, c, g, or t
  misc_feature (1138)..(1138): n is a, c, g, or t
  misc_feature (1143)..(1143): n is a, c, g, or t
  misc_feature (1150)..(1150): n is a, c, g, or t
  misc_feature (1152)..(1154): n is a, c, g, or t
  misc_feature (1156)..(1156): n is a, c, g, or t
  misc_feature (1160)..(1160): n is a, c, g, or t
  misc_feature (1165)..(1165): n is a, c, g, or t
  misc_feature (1168)..(1168): n is a, c, g, or t
  misc_feature (1173)..(1173): n is a, c, g, or t
  misc_feature (1177)..(1177): n is a, c, g, or t
  misc_feature (1179)..(1181): n is a, c, g, or t
  misc_feature (1186)..(1189): n is a, c, g, or t
  misc_feature (1192)..(1193): n is a, c, g, or t
  misc_feature (1196)..(1202): n is a, c, g, or t
  misc_feature (1206)..(1206): n is a, c, g, or t
  misc_feature (1212)..(1212): n is a, c, g, or t
  misc_feature (1222)..(1222): n is a, c, g, or t
  misc_feature (1229)..(1230): n is a, c, g, or t
  misc_feature (1232)..(1232): n is a, c, g, or t
  misc_feature (1237)..(1241): n is a, c, g, or t
  misc_feature (1244)..(1244): n is a, c, g, or t
  misc_feature (1246)..(1249): n is a, c, g, or t
  misc_feature (1251)..(1251): n is a, c, g, or t
  misc_feature (1253)..(1256): n is a, c, g, or t
  misc_feature (1261)..(1261): n is a, c, g, or t
  misc_feature (1273)..(1273): n is a, c, g, or t
  misc_feature (1283)..(1285): n is a, c, g, or t
  misc_feature (1287)..(1287): n is a, c, g, or t
  misc_feature (1290)..(1290): n is a, c, g, or t
  misc_feature (1293)..(1293): n is a, c, g, or t
  misc_feature (1297)..(1298): n is a, c, g, or t
  misc_feature (1301)..(1306): n is a, c, g, or t
  misc_feature (1308)..(1312): n is a, c, g, or t
  misc_feature (1316)..(1316): n is a, c, g, or t
  misc_feature (1318)..(1322): n is a, c, g, or t
  misc_feature (1324)..(1324): n is a, c, g, or t
  misc_feature (1329)..(1329): n is a, c, g, or t
  misc_feature (1331)..(1335): n is a, c, g, or t
  misc_feature (1342)..(1345): n is a, c, g, or t
  misc_feature (1348)..(1352): n is a, c, g, or t
  misc_feature (1356)..(1359): n is a, c, g, or t
agaaattactatgagaggatcgcatcaccatcaccatcacggatcctatttaggtgacactatagaatcgtcgacccacgcgtccggccaactctcgcactctgttcttccgccgctccgccgtcgcgtttctctgccggtcgcaatggaagaagagatcgccgcgctggtcattgacaatggctccggcatgtgcaaagctggttttgctggggacgacgctccccgagccgtgtttccttccatcgtcgggcgccccagacaccagggcgtcatggtgggcatgggccagaaggactcctacgtgggcgacgaggcccagagcaagcgtggcatcctgaccctgaagtaccccattgagcatggcatcgtcaccaactgggacgacatggagaagatgactcagattatgtttgagaccttcaacaccccggccatgtacgtggccatccaggccgtgctgtccctctacgcctctgggcgcaccactggcattgtcatggactctggagacggggtcacccacacggtgcccatctacgagggctacgccctcccccacgccatcctgcgtctggacctggctggccgggacctgaccgactacctcatgaagatcctcactgagcgaggctacagcttcaccaccacggccgagcgggaaatcgtgcgcgacatcaaggagaagctgtgctacgtcgccctggacttcgagcaggagatggccaccgccgcatcctcctcttctctggagaagagctacgagctgcccgatggccaggtcatcaccattggcaatgagcggttccggtgtccggaggcgctgttccagccttccttcctgggtatggaatcttgcggcatccacganaccaccttcaactccatcatgaagtgtgacgtggacatccgcaaanaacctgtacgccaacacggtgctgtcgggcggcaccaccatgtatccgggcatngccgaaaggatgcaaaaggaaatcaccgccctggnncccancaccntgaaaaatcaanatcatcncacccccaaaanncaannactcnggggggaatngggggntccatcntggnctnnntgntcnccttccannaaaagnggantaacaancnggantnnaanaantcggnccctccntnnncnccgnaaagnttntaaangaantnnnaaaannnnaannttnnnnnnngggntaattnaaaaaaaaantttcccnngnaaagnnnnnccntnnnnancnnnnaaaanggaaaaaccttnaaaaaaattnnntnaanttntttnnaannnnnngnnnnnaaantnnnnnantttancnnnnnaaaaaannnnccnnnnnaaannnng

SEQ ID NO: 479 - DNA, 1342 bp, Homo Sapiens
  misc_feature (1)..(2): n is a, c, g, or t
  misc_feature (850)..(850): n is a, c, g, or t
  misc_feature (870)..(870): n is a, c, g, or t
  misc_feature (924)..(924): n is a, c, g, or t
  misc_feature (938)..(938): n is a, c, g, or t
  misc_feature (941)..(941): n is a, c, g, or t
  misc_feature (965)..(965): n is a, c, g, or t
  misc_feature (967)..(967): n is a, c, g, or t
  misc_feature (994)..(994): n is a, c, g, or t
  misc_feature (1006)..(1006): n is a, c, g, or t
  misc_feature (1010)..(1010): n is a, c, g, or t
  misc_feature (1012)..(1012): n is a, c, g, or t
  misc_feature (1021)..(1021): n is a, c, g, or t
  misc_feature (1027)..(1027): n is a, c, g, or t
  misc_feature (1029)..(1029): n is a, c, g, or t
  misc_feature (1035)..(1035): n is a, c, g, or t
  misc_feature (1038)..(1038): n is a, c, g, or t
  misc_feature (1045)..(1045): n is a, c, g, or t
  misc_feature (1050)..(1050): n is a, c, g, or t
  misc_feature (1057)..(1057): n is a, c, g, or t
  misc_feature (1062)..(1062): n is a, c, g, or t
  misc_feature (1072)..(1072): n is a, c, g, or t
  misc_feature (1075)..(1075): n is a, c, g, or t
  misc_feature (1082)..(1082): n is a, c, g, or t
  misc_feature (1088)..(1089): n is a, c, g, or t
  misc_feature (1093)..(1093): n is a, c, g, or t
  misc_feature (1097)..(1098): n is a, c, g, or t
  misc_feature (1100)..(1101): n is a, c, g, or t
  misc_feature (1103)..(1104): n is a, c, g, or t
  misc_feature (1115)..(1116): n is a, c, g, or t
  misc_feature (1127)..(1128): n is a, c, g, or t
  misc_feature (1135)..(1135): n is a, c, g, or t
  misc_feature (1139)..(1139): n is a, c, g, or t
  misc_feature (1152)..(1152): n is a, c, g, or t
  misc_feature (1156)..(1156): n is a, c, g, or t
  misc_feature (1167)..(1168): n is a, c, g, or t
  misc_feature (1183)..(1184): n is a, c, g, or t
  misc_feature (1187)..(1187): n is a, c, g, or t
  misc_feature (1189)..(1189): n is a, c, g, or t
  misc_feature (1191)..(1191): n is a, c, g, or t
  misc_feature (1197)..(1197): n is a, c, g, or t
  misc_feature (1199)..(1199): n is a, c, g, or t
  misc_feature (1202)..(1202): n is a, c, g, or t
  misc_feature (1209)..(1209): n is a, c, g, or t
  misc_feature (1211)..(1211): n is a, c, g, or t
  misc_feature (1215)..(1216): n is a, c, g, or t
  misc_feature (1220)..(1221): n is a, c, g, or t
  misc_feature (1224)..(1224): n is a, c, g, or t
  misc_feature (1227)..(1228): n is a, c, g, or t
  misc_feature (1232)..(1233): n is a, c, g, or t
  misc_feature (1237)..(1240): n is a, c, g, or t
  misc_feature (1245)..(1245): n is a, c, g, or t
  misc_feature (1258)..(1260): n is a, c, g, or t
  misc_feature (1268)..(1269): n is a, c, g, or t
  misc_feature (1272)..(1275): n is a, c, g, or t
  misc_feature (1279)..(1279): n is a, c, g, or t
  misc_feature (1281)..(1281): n is a, c, g, or t
  misc_feature (1286)..(1286): n is a, c, g, or t
  misc_feature (1293)..(1294): n is a, c, g, or t
  misc_feature (1296)..(1296): n is a, c, g, or t
  misc_feature (1301)..(1301): n is a, c, g, or t
  misc_feature (1304)..(1304): n is a, c, g, or t
  misc_feature (1306)..(1311): n is a, c, g, or t
  misc_feature (1315)..(1342): n is a, c, g, or t
nnattgagaaattactatgagaggatcgcatcaccatcaccatcacggatcctatttaggtgacactatagaatcgtcgacccacgcgtccgaaaaagaattacatagtgaaccgtcctcaaatgaaacccagtggaaagagcttactcagtattttggagtcaatgatagatttgacccgcctgttaaaaggaaaaaagttgagaagtcaggccttgaaaagaggatagaccaggctgtggaggagtggaatattgagaaggctgaggaactcagcaaccagctagctactcgagagcttggtgtaaaaattgccaaagcagttgcctgccacaactttgtaaaagccaaaaaggaggttgaaaattcacaggctgcccgaaaaaagaagaaacttgcatgggggtttgaagcaaagaagagatgggaaaccaaaagcaacatgggatacatgtaacttgccagagtgcttcaagacatttgtagactcaaatgctcaatttactgagaatgttttcctgcctatgttaatatgtcagaaaattgatagcactaaaacaaaaataagcataaaatttgggattttgattatcagctcttttcagtctttctttaaggactttgtcctattgaagtgaataaaatgaagcattctgttatttgtataagaaatgtaagaaaaaaaatatagaaagaagaggataggattttgtttatttgtatggatggacccttggtataaaatcacttttggcgctttccattcatttggtttagcacagccagtgagcttctcgtactttctttcttttttttttttttttgaaacagagcctcgcttgctctgtcncccaggctaaagtgcagtancacgatcttggctcactgcaaccactgcttcctgggttcaagtgattctcatgncctcaccccctgantanctgggattatggacaatgcccccncncccggctaatttttttttttttttganttttaaaaaaanacananttttgctgngttggncngctggnctngaacccnggccncaaagantcccngcccccgccnccnaagttcngggaannaaanatgnncnncnngccgcccttgnntttcttaccgnncccgggnactnccctttacgggancggnttttaaacggnngttttttaaggatannccnangnccaaancnccnttgaatntntttnnaggnntgnccnnaggnnaaannnnttggntttttttttgggnnntttttttnnaannnnaaancnttttntttttgnntnccaanctncnnnnnngggnnnnnnnnnnnnnnnnnnnnnnnnnnnn

SEQ ID NO: 480 - DNA, 1385 bp, Homo Sapiens
  misc_feature (5)..(5): n is a, c, g, or t
  misc_feature (434)..(434): n is a, c, g, or t
  misc_feature (486)..(486): n is a, c, g, or t
  misc_feature (586)..(586): n is a, c, g, or t
  misc_feature (622)..(622): n is a, c, g, or t
  misc_feature (672)..(672): n is a, c, g, or t
  misc_feature (693)..(693): n is a, c, g, or t
  misc_feature (706)..(706): n is a, c, g, or t
  misc_feature (709)..(709): n is a, c, g, or t
  misc_feature (740)..(740): n is a, c, g, or t
  misc_feature (758)..(758): n is a, c, g, or t
  misc_feature (760)..(760): n is a, c, g, or t
  misc_feature (769)..(769): n is a, c, g, or t
  misc_feature (778)..(778): n is a, c, g, or t
  misc_feature (781)..(781): n is a, c, g, or t
  misc_feature (789)..(789): n is a, c, g, or t
  misc_feature (806)..(806): n is a, c, g, or t
  misc_feature (809)..(809): n is a, c, g, or t
  misc_feature (818)..(818): n is a, c, g, or t
  misc_feature (835)..(835): n is a, c, g, or t
  misc_feature (842)..(842): n is a, c, g, or t
  misc_feature (846)..(846): n is a, c, g, or t
  misc_feature (852)..(852): n is a, c, g, or t
  misc_feature (856)..(856): n is a, c, g, or t
  misc_feature (864)..(864): n is a, c, g, or t
  misc_feature (871)..(872): n is a, c, g, or t
  misc_feature (874)..(874): n is a, c, g, or t
  misc_feature (876)..(876): n is a, c, g, or t
  misc_feature (887)..(887): n is a, c, g, or t
  misc_feature (889)..(890): n is a, c, g, or t
  misc_feature (894)..(894): n is a, c, g, or t
  misc_feature (906)..(907): n is a, c, g, or t
  misc_feature (909)..(909): n is a, c, g, or t
  misc_feature (918)..(918): n is a, c, g, or t
  misc_feature (934)..(934): n is a, c, g, or t
  misc_feature (941)..(942): n is a, c, g, or t
  misc_feature (950)..(950): n is a, c, g, or t
  misc_feature (953)..(953): n is a, c, g, or t
  misc_feature (955)..(955): n is a, c, g, or t
  misc_feature (963)..(963): n is a, c, g, or t
  misc_feature (977)..(977): n is a, c, g, or t
  misc_feature (982)..(982): n is a, c, g, or t
  misc_feature (985)..(985): n is a, c, g, or t
  misc_feature (987)..(987): n is a, c, g, or t
  misc_feature (996)..(997): n is a, c, g, or t
  misc_feature (1000)..(1000): n is a, c, g, or t
  misc_feature (1004)..(1004): n is a, c, g, or t
  misc_feature (1016)..(1016): n is a, c, g, or t
  misc_feature (1020)..(1021): n is a, c, g, or t
  misc_feature (1027)..(1027): n is a, c, g, or t
  misc_feature (1029)..(1030): n is a, c, g, or t
  misc_feature (1032)..(1032): n is a, c, g, or t
  misc_feature (1036)..(1036): n is a, c, g, or t
  misc_feature (1038)..(1038): n is a, c, g, or t
  misc_feature (1040)..(1040): n is a, c, g, or t
  misc_feature (1051)..(1053): n is a, c, g, or t
  misc_feature (1056)..(1056): n is a, c, g, or t
  misc_feature (1059)..(1059): n is a, c, g, or t
  misc_feature (1066)..(1066): n is a, c, g, or t
  misc_feature (1073)..(1073): n is a, c, g, or t
  misc_feature (1075)..(1075): n is a, c, g, or t
  misc_feature (1077)..(1077): n is a, c, g, or t
  misc_feature (1079)..(1079): n is a, c, g, or t
  misc_feature (1086)..(1086): n is a, c, g, or t
  misc_feature (1089)..(1089): n is a, c, g, or t
  misc_feature (1091)..(1092): n is a, c, g, or t
  misc_feature (1094)..(1094): n is a, c, g, or t
  misc_feature (1096)..(1096): n is a, c, g, or t
  misc_feature (1099)..(1100): n is a, c, g, or t
  misc_feature (1104)..(1104): n is a, c, g, or t
  misc_feature (1109)..(1109): n is a, c, g, or t
  misc_feature (1111)..(1111): n is a, c, g, or t
  misc_feature (1117)..(1117): n is a, c, g, or t
  misc_feature (1121)..(1122): n is a, c, g, or t
  misc_feature (1124)..(1124): n is a, c, g, or t
  misc_feature (1129)..(1129): n is a, c, g, or t
  misc_feature (1145)..(1145): n is a, c, g, or t
  misc_feature (1149)..(1149): n is a, c, g, or t
  misc_feature (1155)..(1155): n is a, c, g, or t
  misc_feature (1159)..(1159): n is a, c, g, or t
  misc_feature (1172)..(1172): n is a, c, g, or t
  misc_feature (1176)..(1176): n is a, c, g, or t
  misc_feature (1180)..(1180): n is a, c, g, or t
  misc_feature (1182)..(1182): n is a, c, g, or t
  misc_feature (1189)..(1190): n is a, c, g, or t
  misc_feature (1201)..(1201): n is a, c, g, or t
  misc_feature (1203)..(1203): n is a, c, g, or t
  misc_feature (1218)..(1218): n is a, c, g, or t
  misc_feature (1224)..(1224): n is a, c, g, or t
  misc_feature (1238)..(1238): n is a, c, g, or t
  misc_feature (1240)..(1240): n is a, c, g, or t
  misc_feature (1250)..(1252): n is a, c, g, or t
  misc_feature (1255)..(1256): n is a, c, g, or t
  misc_feature (1259)..(1259): n is a, c, g, or t
  misc_feature (1262)..(1262): n is a, c, g, or t
  misc_feature (1265)..(1265): n is a, c, g, or t
  misc_feature (1270)..(1270): n is a, c, g, or t
  misc_feature (1277)..(1277): n is a, c, g, or t
  misc_feature (1279)..(1279): n is a, c, g, or t
  misc_feature (1283)..(1283): n is a, c, g, or t
  misc_feature (1286)..(1286): n is a, c, g, or t
  misc_feature (1288)..(1288): n is a, c, g, or t
  misc_feature (1290)..(1291): n is a, c, g, or t
  misc_feature (1294)..(1294): n is a, c, g, or t
  misc_feature (1296)..(1296): n is a, c, g, or t
  misc_feature (1301)..(1302): n is a, c, g, or t
  misc_feature (1304)..(1304): n is a, c, g, or t
  misc_feature (1311)..(1311): n is a, c, g, or t
  misc_feature (1313)..(1313): n is a, c, g, or t
  misc_feature (1318)..(1318): n is a, c, g, or t
  misc_feature (1320)..(1321): n is a, c, g, or t
  misc_feature (1324)..(1324): n is a, c, g, or t
  misc_feature (1327)..(1331): n is a, c, g, or t
  misc_feature (1334)..(1334): n is a, c, g, or t
  misc_feature (1343)..(1343): n is a, c, g, or t
  misc_feature (1346)..(1346): n is a, c, g, or t
  misc_feature (1354)..(1354): n is a, c, g, or t
  misc_feature (1356)..(1356): n is a, c, g, or t
  misc_feature (1361)..(1361): n is a, c, g, or t
  misc_feature (1366)..(1366): n is a, c, g, or t
  misc_feature (1373)..(1373): n is a, c, g, or t
  misc_feature (1376)..(1376): n is a, c, g, or t
  misc_feature (1378)..(1378): n is a, c, g, or t
aagantagagaaattactatgagaggatcgcatcaccatcaccatcacggatcctatttaggtgacactatagaatcgtcgacccacgcgatccgcgttctccagggtagcacccttgggcagcccagccaacgctgtcgcgtggagcggcgcccgcatccccatgcgcgcaggcggctccggggccgcgccgcgctgattcgctgccggccgcgcagactgcggcgccagcgacgctcccgcccctcaccgcgcgccgcctggtgcagcctcagtctctccgcagccgcgcggccactgcgagcccagccgcagcagccgggcaccaacgcttgagtgcacgctcggcgcccccgaggagagccacggcgagcccccaaagcccgcacgatgcaggccactgccgattccaccaagatggactgtgtgtggancaactggaaaagtcaggctattgacctgttgtattggcgggacatcaagcanacgggcatcgtgtttgggagtttcctgctgctgctcttctccctgacccagttcagcgtggtgagcgtcgtggcctacctggccctggccgcactctcanccaccatcagtttccgcatctacaagtctgttttanaagcagtgcagaaaaccgacgaaggccaccctttcaaggcctacttggancttgagatcaccctttctcangagcaagattcanaantacacggactgcctgcatttctaatttgaanaagcacacttaaggaacntnaggaggctnttccatgtncangaacctgntggattccttataattngcnagtcctgantgtggcctcctgaaacntacgttnggcnctcttnttcnaatgggcntgacccnngntngctcaagggcnannggantttcatggtttnnantctaccttntaatggaatgttaaancctaaannaaaaaaantgnancaataatntggggaactttgtnaaggnaantnaaaaaaaannctnttgngataaaaaattnaggnntaaaantnncnaggnancntaaaaaagaannnttnaanaaaattnaattttncnancnggggaantgngnntncnaannaggnaaatntnttgggnatanngntaaanattttttttttttttnactncttttnattnaaaaataaaagtnattntttncncccttcnntttaaaaaacntnaaattttaaaaaaantaatcntttaataaactctntntttttaaagnnnttnnctntanaanacttnaaaaatntntttnaantnannatntnataannantattatntntaacntnnaanaannnnnaanatatgaggnttnatataatnantgtgncatanaaaaaanttntntagtggg

SEQ ID NO: 481 - DNA, 1392 bp, Homo Sapiens
  misc_feature (1)..(1): n is a, c, g, or t
  misc_feature (859)..(859): n is a, c, g, or t
  misc_feature (868)..(868): n is a, c, g, or t
  misc_feature (875)..(875): n is a, c, g, or t
  misc_feature (886)..(886): n is a, c, g, or t
  misc_feature (908)..(908): n is a, c, g, or t
  misc_feature (937)..(937): n is a, c, g, or t
  misc_feature (946)..(946): n is a, c, g, or t
  misc_feature (950)..(950): n is a, c, g, or t
  misc_feature (964)..(965): n is a, c, g, or t
  misc_feature (988)..(988): n is a, c, g, or t
  misc_feature (991)..(991): n is a, c, g, or t
  misc_feature (1009)..(1009): n is a, c, g, or t
  misc_feature (1022)..(1022): n is a, c, g, or t
  misc_feature (1033)..(1033): n is a, c, g, or t
  misc_feature (1040)..(1040): n is a, c, g, or t
  misc_feature (1044)..(1044): n is a, c, g, or t
  misc_feature (1046)..(1046): n is a, c, g, or t
  misc_feature (1061)..(1061): n is a, c, g, or t
  misc_feature (1067)..(1067): n is a, c, g, or t
  misc_feature (1081)..(1082): n is a, c, g, or t
  misc_feature (1087)..(1088): n is a, c, g, or t
  misc_feature (1093)..(1093): n is a, c, g, or t
  misc_feature (1095)..(1095): n is a, c, g, or t
  misc_feature (1097)..(1097): n is a, c, g, or t
  misc_feature (1100)..(1100): n is a, c, g, or t
  misc_feature (1105)..(1105): n is a, c, g, or t
  misc_feature (1111)..(1111): n is a, c, g, or t
  misc_feature (1114)..(1114): n is a, c, g, or t
  misc_feature (1120)..(1120): n is a, c, g, or t
  misc_feature (1124)..(1124): n is a, c, g, or t
  misc_feature (1128)..(1128): n is a, c, g, or t
  misc_feature (1132)..(1132): n is a, c, g, or t
  misc_feature (1136)..(1136): n is a, c, g, or t
  misc_feature (1142)..(1143): n is a, c, g, or t
  misc_feature (1148)..(1148): n is a, c, g, or t
  misc_feature (1157)..(1157): n is a, c, g, or t
  misc_feature (1162)..(1162): n is a, c, g, or t
  misc_feature (1168)..(1168): n is a, c, g, or t
  misc_feature (1171)..(1171): n is a, c, g, or t
  misc_feature (1188)..(1188): n is a, c, g, or t
  misc_feature (1192)..(1192): n is a, c, g, or t
  misc_feature (1196)..(1196): n is a, c, g, or t
  misc_feature (1210)..(1210): n is a, c, g, or t
  misc_feature (1219)..(1221): n is a, c, g, or t
  misc_feature (1225)..(1225): n is a, c, g, or t
  misc_feature (1247)..(1247): n is a, c, g, or t
  misc_feature (1253)..(1254): n is a, c, g, or t
  misc_feature (1260)..(1262): n is a, c, g, or t
  misc_feature (1264)..(1265): n is a, c, g, or t
  misc_feature (1273)..(1273): n is a, c, g, or t
  misc_feature (1278)..(1278): n is a, c, g, or t
  misc_feature (1285)..(1289): n is a, c, g, or t
  misc_feature (1295)..(1295): n is a, c, g, or t
  misc_feature (1299)..(1299): n is a, c, g, or t
  misc_feature (1304)..(1304): n is a, c, g, or t
  misc_feature (1307)..(1307): n is a, c, g, or t
  misc_feature (1311)..(1311): n is a, c, g, or t
  misc_feature (1315)..(1317): n is a, c, g, or t
  misc_feature (1319)..(1319): n is a, c, g, or t
  misc_feature (1321)..(1322): n is a, c, g, or t
  misc_feature (1332)..(1334): n is a, c, g, or t
  misc_feature (1336)..(1341): n is a, c, g, or t
  misc_feature (1346)..(1346): n is a, c, g, or t
  misc_feature (1348)..(1348): n is a, c, g, or t
  misc_feature (1351)..(1351): n is a, c, g, or t
  misc_feature (1353)..(1353): n is a, c, g, or t
  misc_feature (1358)..(1359): n is a, c, g, or t
  misc_feature (1365)..(1367): n is a, c, g, or t
  misc_feature (1370)..(1376): n is a, c, g, or t
  misc_feature (1378)..(1378): n is a, c, g, or t
  misc_feature (1380)..(1382): n is a, c, g, or t
  misc_feature (1384)..(1384): n is a, c, g, or t
  misc_feature (1386)..(1387): n is a, c, g, or t
  misc_feature (1391)..(1392): n is a, c, g, or t
nttagagaaaattactatgagaggatcgcatcaccatcaccatcacggatcctatttaggtgacactatagaatcgtcgacccacgcgtccgcccacgcgtccgcagagcatcatcagcaccgtgggccaagctttcgagctgcgcttcaagcagtacctgcacagcccgcccaaggtggcgctgcccccagaaaggctggcagggccggaggagtcggcctggggggacgaggaggactctttggagcacaattactacaacagcatcccggggaaggagccgccgctgggcgggctagtggactccaggctggccctgacacagccctgcgccctcacggccctcgaccagggcccatctccttctctaagagatgcctgcagcctgccatgggacgtggggtccaccggtacaggaccagtggcccagcccccctacccgccgggcccctgtggcccccacggaggaacagctgcgtcaggagccctggtaccacggccggatgagccgccgggcggcagagaggatgcttcgagctgacggggacttccttgtgcgagacagcgtcaccaaccccgggcagtatgtcctcaccggcatgcacgccgggcagcccaagcacctgctgctcgtggaccccgagggcgtggtacggacgaaggacgtgctgtttgagagcatcagccacctgatcgaccaccacctgcagaacgggcagcccatcgtggccgccgagagtgagctgcacctgcgtggcgtggtctcacgggagccctgagccaggtgaccgttctcagccctggctcctgcctgttctcagccccagctcctgcctgtcatggccttggggctctcanccctcctcntggatcntggtcaggccnaaacaccgctgcctctcctttnttcgcatgaacctctggcatggtctttcntcaactggncccngggctgggcaaaannttcttcttgccggggccccttgnccnaccccctcttttgcctgnagtgagggtgttnatacaaaaaanggaaacntttncnccttttaaaaaaaanaattcnaaaaacaacccctnncttcnnaaccntngnccnggggntccccntcncccctnggtnggtncggncaancccccnnaaaantaaaattcnaaaanctgggnaanaaagggaattccgggcngggngggnttttttttcccctnaaaaagggnnncaantttttttaaggggaaccttaangttttnnggtttnnngnnaaaaaatnttggntaaaatnnnnnctttantccntgaanttngggnaacnnntntnnaaaaggaatnnnannnnnngcccntntcntnaaaannaaaaannnttnnnnnnntncnnnantnncccnn

SEQ ID NO: 482 - DNA, 1372 bp, Homo Sapiens
  misc_feature (933)..(933): n is a, c, g, or t
  misc_feature (949)..(949): n is a, c, g, or t
  misc_feature (982)..(982): n is a, c, g, or t
  misc_feature (994)..(994): n is a, c, g, or t
  misc_feature (1005)..(1005): n is a, c, g, or t
  misc_feature (1009)..(1009): n is a, c, g, or t
  misc_feature (1017)..(1017): n is a, c, g, or t
  misc_feature (1028)..(1028): n is a, c, g, or t
  misc_feature (1030)..(1030): n is a, c, g, or t
  misc_feature (1045)..(1045): n is a, c, g, or t
  misc_feature (1047)..(1047): n is a, c, g, or t
  misc_feature (1059)..(1059): n is a, c, g, or t
  misc_feature (1063)..(1063): n is a, c, g, or t
  misc_feature (1065)..(1065): n is a, c, g, or t
  misc_feature (1091)..(1092): n is a, c, g, or t
  misc_feature (1094)..(1094): n is a, c, g, or t
  misc_feature (1097)..(1097): n is a, c, g, or t
  misc_feature (1118)..(1118): n is a, c, g, or t
  misc_feature (1120)..(1120): n is a, c, g, or t
  misc_feature (1126)..(1126): n is a, c, g, or t
  misc_feature (1130)..(1130): n is a, c, g, or t
  misc_feature (1137)..(1137): n is a, c, g, or t
  misc_feature (1153)..(1153): n is a, c, g, or t
  misc_feature (1164)..(1164): n is a, c, g, or t
  misc_feature (1167)..(1167): n is a, c, g, or t
  misc_feature (1181)..(1181): n is a, c, g, or t
  misc_feature (1190)..(1191): n is a, c, g, or t
  misc_feature (1194)..(1194): n is a, c, g, or t
  misc_feature (1209)..(1209): n is a, c, g, or t
  misc_feature (1216)..(1217): n is a, c, g, or t
  misc_feature (1219)..(1219): n is a, c, g, or t
  misc_feature (1225)..(1227): n is a, c, g, or t
  misc_feature (1229)..(1230): n is a, c, g, or t
  misc_feature (1233)..(1236): n is a, c, g, or t
  misc_feature (1238)..(1238): n is a, c, g, or t
  misc_feature (1242)..(1242): n is a, c, g, or t
  misc_feature (1247)..(1247): n is a, c, g, or t
  misc_feature (1257)..(1257): n is a, c, g, or t
  misc_feature (1260)..(1261): n is a, c, g, or t
  misc_feature (1263)..(1264): n is a, c, g, or t
  misc_feature (1269)..(1269): n is a, c, g, or t
  misc_feature (1290)..(1290): n is a, c, g, or t
  misc_feature (1294)..(1294): n is a, c, g, or t
  misc_feature (1297)..(1299): n is a, c, g, or t
  misc_feature (1312)..(1314): n is a, c, g, or t
  misc_feature (1318)..(1321): n is a, c, g, or t
  misc_feature (1337)..(1337): n is a, c, g, or t
  misc_feature (1343)..(1343): n is a, c, g, or t
  misc_feature (1350)..(1350): n is a, c, g, or t
  misc_feature (1354)..(1355): n is a, c, g, or t
  misc_feature (1360)..(1361): n is a, c, g, or t
  misc_feature (1363)..(1367): n is a, c, g, or t
attgaggaaattactatgagaggatcgcatcaccatcaccatcacggatcctatttaggtgacactatagaatcgtcgacccacgcgtccgcccacgcgtccgtctctccagaaggttctgccggttcccccagctctgggtacccggctctgcatcgcgtcgccatgatgggccatcgtccagtgctcgtgctcagccagaacacaaagcgtgaatccggaagaaaagttcaatctggaaacatcaatgctgccaagattcaagtccagcatccagcggccaagtccatgatcgaaattagccggacccaggatgaagaggttggagatgggaccacatcagtaattattcttgcaggggaaatgctgtctgtagctgagcacttcctggagcagcagatgcacccaacagtggtgatcagtgcttaccgcaaggcattggatgatatgatcagcaccctaaagaaaataagtatcccagtcgacatcagtgacagtgatatgatgctgaacatcatcaacagctctattactaccaaagccatcagtcggtggtcatctttggcttgcaacattgccctggatgctgtcaagatggtacagtttgaggagaatggtcggaaagagattgacataaaaaaatatgcaagagtggaaaagatacctggaggcatcattgaagactcctgtgtcttgcgtggagtcatgattaacaaggatgtgacccatccacgtatgcggcgctatatcaagaaccctcgcattgtgctgctggattcttctctggaatacaagaaaggagaaagccagactgacattgagattacacgagaggaggacttcacccgaattctccagatggaggaagagtacatccagcagctctgtgaggacattatccaactgaagccccgatgtggtcatcactgaaanggcatctcaaatttanctcagcactaccttatgcgggccaatatcacanccatccgcaaantccggaaaaanaaanaataatcncattgctaaancntgggggggcccgganantccccccacccnaagnanctgaaaaaaaaatgatgttggaacannancangcctgttggaaatcaaaaaantngggaangaanactttanttttttccctgactgnaaaaaccccanggnctggcccattttcntccgggggnnaanaaaaaaattctccgnaaaaaanncncctccnnnannccnnnnangggnccaangtttccgganccnncnngggcngggggggggcccccaaagggngggnccnnnctttaaaaaaacnnngccnnnngggggaaaaggccaangggttnccccccnaaannttttnncnnnnnaaagg

SEQ ID NO: 483 - DNA, 1497 bp, Homo Sapiens
  misc_feature (36)..(36): n is a, c, g, or t
  misc_feature (43)..(43): n is a, c, g, or t
  misc_feature (63)..(63): n is a, c, g, or t
  misc_feature (75)..(75): n is a, c, g, or t
  misc_feature (137)..(137): n is a, c, g, or t
  misc_feature (273)..(273): n is a, c, g, or t
  misc_feature (375)..(375): n is a, c, g, or t
  misc_feature (397)..(397): n is a, c, g, or t
  misc_feature (433)..(433): n is a, c, g, or t
  misc_feature (536)..(536): n is a, c, g, or t
  misc_feature (545)..(545): n is a, c, g, or t
  misc_feature (550)..(550): n is a, c, g, or t
  misc_feature (563)..(563): n is a, c, g, or t
  misc_feature (568)..(568): n is a, c, g, or t
  misc_feature (583)..(584): n is a, c, g, or t
  misc_feature (593)..(593): n is a, c, g, or t
  misc_feature (600)..(600): n is a, c, g, or t
  misc_feature (635)..(635): n is a, c, g, or t
  misc_feature (644)..(644): n is a, c, g, or t
  misc_feature (651)..(651): n is a, c, g, or t
  misc_feature (654)..(654): n is a, c, g, or t
  misc_feature (656)..(656): n is a, c, g, or t
  misc_feature (660)..(661): n is a, c, g, or t
  misc_feature (665)..(666): n is a, c, g, or t
  misc_feature (670)..(670): n is a, c, g, or t
  misc_feature (673)..(673): n is a, c, g, or t
  misc_feature (683)..(683): n is a, c, g, or t
  misc_feature (688)..(689): n is a, c, g, or t
  misc_feature (701)..(701): n is a, c, g, or t
  misc_feature (706)..(706): n is a, c, g, or t
  misc_feature (712)..(713): n is a, c, g, or t
  misc_feature (725)..(725): n is a, c, g, or t
  misc_feature (733)..(735): n is a, c, g, or t
  misc_feature (740)..(740): n is a, c, g, or t
  misc_feature (742)..(742): n is a, c, g, or t
  misc_feature (756)..(756): n is a, c, g, or t
  misc_feature (763)..(763): n is a, c, g, or t
  misc_feature (778)..(778): n is a, c, g, or t
  misc_feature (780)..(780): n is a, c, g, or t
  misc_feature (782)..(782): n is a, c, g, or t
  misc_feature (788)..(788): n is a, c, g, or t
  misc_feature (792)..(792): n is a, c, g, or t
  misc_feature (794)..(794): n is a, c, g, or t
  misc_feature (797)..(797): n is a, c, g, or t
  misc_feature (806)..(806): n is a, c, g, or t
  misc_feature (811)..(812): n is a, c, g, or t
  misc_feature (824)..(824): n is a, c, g, or t
  misc_feature (827)..(829): n is a, c, g, or t
  misc_feature (836)..(836): n is a, c, g, or t
  misc_feature (844)..(845): n is a, c, g, or t
  misc_feature (849)..(849): n is a, c, g, or t
  misc_feature (853)..(853): n is a, c, g, or t
  misc_feature (856)..(856): n is a, c, g, or t
  misc_feature (863)..(863): n is a, c, g, or t
  misc_feature (903)..(903): n is a, c, g, or t
  misc_feature (907)..(907): n is a, c, g, or t
  misc_feature (910)..(913): n is a, c, g, or t
  misc_feature (915)..(915): n is a, c, g, or t
  misc_feature (923)..(923): n is a, c, g, or t
  misc_feature (928)..(929): n is a, c, g, or t
  misc_feature (935)..(935): n is a, c, g, or t
  misc_feature (940)..(940): n is a, c, g, or t
  misc_feature (943)..(943): n is a, c, g, or t
  misc_feature (946)..(946): n is a, c, g, or t
  misc_feature (949)..(949): n is a, c, g, or t
  misc_feature (964)..(964): n is a, c, g, or t
  misc_feature (971)..(972): n is a, c, g, or t
  misc_feature (979)..(979): n is a, c, g, or t
  misc_feature (982)..(982): n is a, c, g, or t
  misc_feature (991)..(991): n is a, c, g, or t
  misc_feature (998)..(998): n is a, c, g, or t
  misc_feature (1001)..(1002): n is a, c, g, or t
  misc_feature (1004)..(1004): n is a, c, g, or t
  misc_feature (1007)..(1007): n is a, c, g, or t
  misc_feature (1010)..(1010): n is a, c, g, or t
  misc_feature (1012)..(1013): n is a, c, g, or t
  misc_feature (1015)..(1015): n is a, c, g, or t
  misc_feature (1024)..(1025): n is a, c, g, or t
  misc_feature (1032)..(1032): n is a, c, g, or t
  misc_feature (1041)..(1041): n is a, c, g, or t
  misc_feature (1045)..(1046): n is a, c, g, or t
  misc_feature (1055)..(1055): n is a, c, g, or t
  misc_feature (1061)..(1061): n is a, c, g, or t
  misc_feature (1066)..(1066): n is a, c, g, or t
  misc_feature (1068)..(1068): n is a, c, g, or t
  misc_feature (1070)..(1070): n is a, c, g, or t
  misc_feature (1086)..(1086): n is a, c, g, or t
  misc_feature (1099)..(1099): n is a, c, g, or t
  misc_feature (1101)..(1101): n is a, c, g, or t
  misc_feature (1109)..(1109): n is a, c, g, or t
  misc_feature (1115)..(1115): n is a, c, g, or t
  misc_feature (1122)..(1122): n is a, c, g, or t
  misc_feature (1125)..(1125): n is a, c, g, or t
  misc_feature (1127)..(1127): n is a, c, g, or t
  misc_feature (1135)..(1135): n is a, c, g, or t
  misc_feature (1145)..(1146): n is a, c, g, or t
  misc_feature (1157)..(1157): n is a, c, g, or t
  misc_feature (1159)..(1161): n is a, c, g, or t
  misc_feature (1166)..(1166): n is a, c, g, or t
  misc_feature (1169)..(1169): n is a, c, g, or t
  misc_feature (1177)..(1178): n is a, c, g, or t
  misc_feature (1187)..(1187): n is a, c, g, or t
  misc_feature (1205)..(1205): n is a, c, g, or t
  misc_feature (1208)..(1209): n is a, c, g, or t
  misc_feature (1214)..(1214): n is a, c, g, or t
  misc_feature (1217)..(1218): n is a, c, g, or t
  misc_feature (1221)..(1221): n is a, c, g, or t
  misc_feature (1225)..(1225): n is a, c, g, or t
  misc_feature (1227)..(1228): n is a, c, g, or t
  misc_feature (1232)..(1232): n is a, c, g, or t
  misc_feature (1236)..(1236): n is a, c, g, or t
  misc_feature (1247)..(1248): n is a, c, g, or t
  misc_feature (1255)..(1255): n is a, c, g, or t
  misc_feature (1274)..(1274): n is a, c, g, or t
  misc_feature (1278)..(1278): n is a, c, g, or t
  misc_feature (1281)..(1281): n is a, c, g, or t
  misc_feature (1284)..(1285): n is a, c, g, or t
  misc_feature (1287)..(1287): n is a, c, g, or t
  misc_feature (1291)..(1291): n is a, c, g, or t
  misc_feature (1299)..(1299): n is a, c, g, or t
  misc_feature (1302)..(1302): n is a, c, g, or t
  misc_feature (1307)..(1307): n is a, c, g, or t
  misc_feature (1316)..(1316): n is a, c, g, or t
  misc_feature (1323)..(1323): n is a, c, g, or t
  misc_feature (1326)..(1326): n is a, c, g, or t
  misc_feature (1332)..(1332): n is a, c, g, or t
  misc_feature (1372)..(1372): n is a, c, g, or t
  misc_feature (1380)..(1381): n is a, c, g, or t
  misc_feature (1383)..(1385): n is a, c, g, or t
  misc_feature (1394)..(1394): n is a, c, g, or t
  misc_feature (1397)..(1397): n is a, c, g, or t
  misc_feature (1400)..(1401): n is a, c, g, or t
  misc_feature (1407)..(1407): n is a, c, g, or t
  misc_feature (1419)..(1419): n is a, c, g, or t
  misc_feature (1422)..(1422): n is a, c, g, or t
  misc_feature (1424)..(1424): n is a, c, g, or t
  misc_feature (1434)..(1434): n is a, c, g, or t
  misc_feature (1441)..(1441): n is a, c, g, or t
  misc_feature (1443)..(1443): n is a, c, g, or t
  misc_feature (1445)..(1445): n is a, c, g, or t
  misc_feature (1449)..(1449): n is a, c, g, or t
  misc_feature (1451)..(1451): n is a, c, g, or t
  misc_feature (1455)..(1455): n is a, c, g, or t
  misc_feature (1457)..(1457): n is a, c, g, or t
  misc_feature (1461)..(1461): n is a, c, g, or t
  misc_feature (1463)..(1463): n is a, c, g, or t
  misc_feature (1466)..(1466): n is a, c, g, or t
  misc_feature (1474)..(1476): n is a, c, g, or t
  misc_feature (1485)..(1485): n is a, c, g, or t
  misc_feature (1497)..(1497): n is a, c, g, or t
aaatagagaaattaattatgaagaggatcgcatcancattcancactcacggatcctatttangtgacactatanaatcgtcgacccacgcgtccggctggagcaggcgagcggcggcggccgatagcgagtgtcanggacggccggggccggggctgcggcgggccggccggggcggcgcttctcggcctgtcgctggtcggcctcctactgtacctcgtgcctgctgcggctgcgctggcctggctggccgtggggactaccgcggcctgntggggactgagcagcgagccccgaggttcgcgccccttgtcctccttcgttcagaaggcgcgacatcggcgaacactgttcgcttcgcctccggccaagtcnacagccaacggaaacctcctanagccgcggaccctgctcgaaggacctgaccctgccnaactgctcctcatgggcagttacctgggcaagcccgggccgccgcagcccgcccccgctccggagggccaggacctgcggaataggcctggccgccgcccgcncgcccggcnccgcnctccacaccgccntccanaccgccctccccgcnnacccatcgngttcacnacttttacccctctctccccaaatccacttctccnaccctccgngaggacnttncncaanntatnngtgngantttaaccaanatcgnnttgtaaataaanacctntaatanntttatctcgatnccatcaannnccaananattcctgttctggnagggtanttctcaaaattttgnangnaaatgnttantnaanataaaaggnttgtnnctgttcccctcncannntttccanaaaagatnngtanctanatngaattcnaaaaatttcccctccataacaaaaaaatttttcccttttntacnaannnnanaaattaanaattnntctttnaaaanttnttnttnaaaattcaaattaanttcaccnnaaaatcnaantgttaaaantaaaacnttnntnaantgncnntnaaacaaaannaaaaaanaaaatgatntctnnaaaaaaaantaaaanattantncnttgtaatataaaaaanattaatataaatntntcttgttnaaattntcattanaanantctttttntatttaaatnnctcaataatgnannnaaatncanttacattnntaaattgantatcttcatttattatanaannattanaanntanaaantnntttnaacnattaaaatttnncttatanaaaattaattcaaaaaatntatnttntcnntntttntacaaatntantatangtgattaanaatatanttntaatanctttaattttttacaataaatatttttccctacacttttntataaacnntnnntacattacntanttnntctatnctaataattctnttnancaataaaatnaagtaantngnattntntacntntaantnttntactgttnnnatgttattntaattataatan

SEQ ID NO: 484 - DNA, 1308 bp, Homo Sapiens
  misc_feature (2)..(2): n is a, c, g, or t
  misc_feature (602)..(602): n is a, c, g, or t
  misc_feature (623)..(623): n is a, c, g, or t
  misc_feature (645)..(645): n is a, c, g, or t
  misc_feature (656)..(656): n is a, c, g, or t
  misc_feature (667)..(667): n is a, c, g, or t
  misc_feature (673)..(673): n is a, c, g, or t
  misc_feature (683)..(683): n is a, c, g, or t
  misc_feature (693)..(693): n is a, c, g, or t
  misc_feature (696)..(696): n is a, c, g, or t
  misc_feature (700)..(700): n is a, c, g, or t
  misc_feature (709)..(709): n is a, c, g, or t
  misc_feature (715)..(715): n is a, c, g, or t
  misc_feature (731)..(731): n is a, c, g, or t
  misc_feature (733)..(733): n is a, c, g, or t
  misc_feature (739)..(739): n is a, c, g, or t
  misc_feature (743)..(743): n is a, c, g, or t
  misc_feature (748)..(748): n is a, c, g, or t
  misc_feature (759)..(759): n is a, c, g, or t
  misc_feature (762)..(762): n is a, c, g, or t
  misc_feature (764)..(764): n is a, c, g, or t
  misc_feature (769)..(769): n is a, c, g, or t
  misc_feature (774)..(774): n is a, c, g, or t
  misc_feature (779)..(779): n is a, c, g, or t
  misc_feature (789)..(789): n is a, c, g, or t
  misc_feature (792)..(792): n is a, c, g, or t
  misc_feature (797)..(797): n is a, c, g, or t
  misc_feature (808)..(808): n is a, c, g, or t
  misc_feature (813)..(813): n is a, c, g, or t
  misc_feature (822)..(822): n is a, c, g, or t
  misc_feature (830)..(830): n is a, c, g, or t
  misc_feature (833)..(833): n is a, c, g, or t
  misc_feature (839)..(839): n is a, c, g, or t
  misc_feature (843)..(843): n is a, c, g, or t
  misc_feature (845)..(845): n is a, c, g, or t
  misc_feature (848)..(849): n is a, c, g, or t
  misc_feature (853)..(853): n is a, c, g, or t
  misc_feature (858)..(861): n is a, c, g, or t
  misc_feature (869)..(870): n is a, c, g, or t
  misc_feature (872)..(872): n is a, c, g, or t
  misc_feature (875)..(876): n is a, c, g, or t
  misc_feature (878)..(878): n is a, c, g, or t
  misc_feature (880)..(884): n is a, c, g, or t
  misc_feature (887)..(890): n is a, c, g, or t
  misc_feature (893)..(894): n is a, c, g, or t
  misc_feature (897)..(900): n is a, c, g, or t
  misc_feature (903)..(903): n is a, c, g, or t
  misc_feature (905)..(905): n is a, c, g, or t
  misc_feature (908)..(919): n is a, c, g, or t
  misc_feature (922)..(924): n is a, c, g, or t
  misc_feature (926)..(929): n is a, c, g, or t
  misc_feature (933)..(933): n is a, c, g, or t
  misc_feature (935)..(935): n is a, c, g, or t
  misc_feature (938)..(941): n is a, c, g, or t
  misc_feature (943)..(948): n is a, c, g, or t
  misc_feature (950)..(951): n is a, c, g, or t
  misc_feature (953)..(961): n is a, c, g, or t
  misc_feature (963)..(973): n is a, c, g, or t
  misc_feature (975)..(978): n is a, c, g, or t
  misc_feature (981)..(982): n is a, c, g, or t
  misc_feature (985)..(985): n is a, c, g, or t
  misc_feature (987)..(987): n is a, c, g, or t
  misc_feature (989)..(990): n is a, c, g, or t
  misc_feature (993)..(993): n is a, c, g, or t
  misc_feature (995)..(1004): n is a, c, g, or t
  misc_feature (1006)..(1006): n is a, c, g, or t
  misc_feature (1011)..(1014): n is a, c, g, or t
  misc_feature (1016)..(1025): n is a, c, g, or t
  misc_feature (1029)..(1029): n is a, c, g, or t
  misc_feature (1031)..(1032): n is a, c, g, or t
  misc_feature (1035)..(1039): n is a, c, g, or t
  misc_feature (1044)..(1054): n is a, c, g, or t
  misc_feature (1056)..(1082): n is a, c, g, or t
  misc_feature (1086)..(1095): n is a, c, g, or t
  misc_feature (1100)..(1109): n is a, c, g, or t
  misc_feature (1111)..(1126): n is a, c, g, or t
  misc_feature (1129)..(1130): n is a, c, g, or t
  misc_feature (1132)..(1230): n is a, c, g, or t
  misc_feature (1235)..(1264): n is a, c, g, or t
  misc_feature (1269)..(1269): n is a, c, g, or t
  misc_feature (1271)..(1302): n is a, c, g, or t
  misc_feature (1305)..(1305): n is a, c, g, or t
  misc_feature (1308)..(1308): n is a, c, g, or t
antagagaaattactatgagaggatcgcatcaccatcaccatcacggatcctatttaggtgacactatagaatcgtcgacccacgcgtccgccaagcaacaaaaaaaaaaccaaccaaaccaagaggcatccaaccaagtccaagtcccgcgtcctggccacacgcccgcaccgagggagcacgccggcaggggcgccgaggagcggccccaggacaggacggccccaccgcgtcctggctggcagcacagtgggaacacgcccctccgtctcaggcagtgggggagttggaggggaaggggcctcccttgtgggacccgtggggggctctgttttccatccagtcttcctttcccagcccccaactcccaagacagacagtgtggagcccagcggcggcggagcaggcccgggcctgagcaggcaggcgctgctagcaagacttgatctttgtggccagctgtgccagggggccggcggggctgaggggtgcgggcagctttcatcccaggggctccactgggccccgtcaccctcctgtcgcgtcccctgcgtcccacctccctcctgcccggcagtcccgcccgtgcccccagcctggngaggaagccgtccaacagtanccccagggccagctcccaacanaaagggctgangtggctccagnactcangggcgctccntgggaggacnaangaancccaccagncagganccactcctcaacctcnantgtggncaantgggncctgaggccangantnattgntcttnctggncatctctccnttntggangaagccggggnctgtntaacaaggntgaactcntgnttctgntggnancanncctncctgnnnnttccctgnnanccnntncnnnnnggnnnnccnnggnnnnggnanggnnnnnnnnnnnnttnnntnnnnggtngnaannnnannnnnntnngnnnnnnnnngnnnnnnnnnnnannnnggnnccntngnnaangnnnnnnnnnngnaaaannnngnnnnnnnnnntttntnnttnnnnnaaaannnnnnnnnnngnnnnnnnnnnnnnnnnnnnnnnnnnnntttnnnnnnnnnnaaaannnnnnnnnnannnnnnnnnnnnnnnnaanncnnnnnnnnnnnnnnnnnnnnnnnnnnnnnnnnnnnnnnnnnnnnnnnnnnnnnnnnnnnnnnnnnnnnnnnnnnnnnnnnnnnnnnnnnnnnnnnnnnnttttnnnnnnnnnnnnnnnnnnnnnnnnnnnnnnttttntnnnnnnnnnnnnnnnnnnnnnnnnnnnnnnnnttnttn

SEQ ID NO: 485 - DNA, 1464 bp, Homo Sapiens
  misc_feature (1)..(8): n is a, c, g, or t
  misc_feature (11)..(11): n is a, c, g, or t
  misc_feature (22)..(23): n is a, c, g, or t
  misc_feature (73)..(73): n is a, c, g, or t
  misc_feature (272)..(272): n is a, c, g, or t
  misc_feature (374)..(374): n is a, c, g, or t
  misc_feature (376)..(376): n is a, c, g, or t
  misc_feature (389)..(389): n is a, c, g, or t
  misc_feature (430)..(430): n is a, c, g, or t
  misc_feature (436)..(436): n is a, c, g, or t
  misc_feature (445)..(445): n is a, c, g, or t
  misc_feature (498)..(498): n is a, c, g, or t
  misc_feature (522)..(522): n is a, c, g, or t
  misc_feature (561)..(561): n is a, c, g, or t
  misc_feature (590)..(591): n is a, c, g, or t
  misc_feature (595)..(595): n is a, c, g, or t
  misc_feature (611)..(611): n is a, c, g, or t
  misc_feature (623)..(623): n is a, c, g, or t
  misc_feature (630)..(630): n is a, c, g, or t
  misc_feature (632)..(632): n is a, c, g, or t
  misc_feature (635)..(635): n is a, c, g, or t
  misc_feature (639)..(640): n is a, c, g, or t
  misc_feature (645)..(645): n is a, c, g, or t
  misc_feature (647)..(647): n is a, c, g, or t
  misc_feature (649)..(649): n is a, c, g, or t
  misc_feature (657)..(657): n is a, c, g, or t
  misc_feature (659)..(659): n is a, c, g, or t
  misc_feature (661)..(661): n is a, c, g, or t
  misc_feature (663)..(663): n is a, c, g, or t
  misc_feature (674)..(674): n is a, c, g, or t
  misc_feature (676)..(676): n is a, c, g, or t
  misc_feature (679)..(679): n is a, c, g, or t
  misc_feature (691)..(691): n is a, c, g, or t
  misc_feature (693)..(693): n is a, c, g, or t
  misc_feature (696)..(697): n is a, c, g, or t
  misc_feature (701)..(701): n is a, c, g, or t
  misc_feature (712)..(712): n is a, c, g, or t
  misc_feature (723)..(723): n is a, c, g, or t
  misc_feature (728)..(728): n is a, c, g, or t
  misc_feature (730)..(730): n is a, c, g, or t
  misc_feature (733)..(733): n is a, c, g, or t
  misc_feature (737)..(737): n is a, c, g, or t
  misc_feature (752)..(752): n is a, c, g, or t
  misc_feature (754)..(756): n is a, c, g, or t
  misc_feature (760)..(760): n is a, c, g, or t
  misc_feature (764)..(764): n is a, c, g, or t
  misc_feature (770)..(770): n is a, c, g, or t
  misc_feature (778)..(778): n is a, c, g, or t
  misc_feature (782)..(782): n is a, c, g, or t
  misc_feature (785)..(785): n is a, c, g, or t
  misc_feature (794)..(794): n is a, c, g, or t
  misc_feature (801)..(803): n is a, c, g, or t
  misc_feature (806)..(806): n is a, c, g, or t
  misc_feature (808)..(808): n is a, c, g, or t
  misc_feature (810)..(811): n is a, c, g, or t
  misc_feature (813)..(813): n is a, c, g, or t
  misc_feature (818)..(819): n is a, c, g, or t
  misc_feature (828)..(828): n is a, c, g, or t
  misc_feature (833)..(833): n is a, c, g, or t
  misc_feature (837)..(839): n is a, c, g, or t
  misc_feature (842)..(842): n is a, c, g, or t
  misc_feature (845)..(845): n is a, c, g, or t
  misc_feature (848)..(849): n is a, c, g, or t
  misc_feature (854)..(854): n is a, c, g, or t
  misc_feature (856)..(856): n is a, c, g, or t
  misc_feature (858)..(858): n is a, c, g, or t
  misc_feature (869)..(869): n is a, c, g, or t
  misc_feature (872)..(873): n is a, c, g, or t
  misc_feature (876)..(877): n is a, c, g, or t
  misc_feature (884)..(884): n is a, c, g, or t
  misc_feature (886)..(889): n is a, c, g, or t
  misc_feature (895)..(895): n is a, c, g, or t
  misc_feature (898)..(898): n is a, c, g, or t
  misc_feature (900)..(900): n is a, c, g, or t
  misc_feature (908)..(908): n is a, c, g, or t
  misc_feature (914)..(915): n is a, c, g, or t
  misc_feature (919)..(919): n is a, c, g, or t
  misc_feature (923)..(923): n is a, c, g, or t
  misc_feature (936)..(938): n is a, c, g, or t
  misc_feature (941)..(941): n is a, c, g, or t
  misc_feature (946)..(946): n is a, c, g, or t
  misc_feature (955)..(955): n is a, c, g, or t
  misc_feature (957)..(957): n is a, c, g, or t
  misc_feature (961)..(961): n is a, c, g, or t
  misc_feature (963)..(963): n is a, c, g, or t
  misc_feature (971)..(971): n is a, c, g, or t
  misc_feature (975)..(975): n is a, c, g, or t
  misc_feature (978)..(978): n is a, c, g, or t
  misc_feature (981)..(981): n is a, c, g, or t
  misc_feature (985)..(985): n is a, c, g, or t
  misc_feature (988)..(989): n is a, c, g, or t
  misc_feature (991)..(991): n is a, c, g, or t
  misc_feature (993)..(993): n is a, c, g, or t
  misc_feature (995)..(995): n is a, c, g, or t
  misc_feature (997)..(997): n is a, c, g, or t
  misc_feature (1001)..(1001): n is a, c, g, or t
  misc_feature (1003)..(1005): n is a, c, g, or t
  misc_feature (1007)..(1007): n is a, c, g, or t
  misc_feature (1017)..(1017): n is a, c, g, or t
  misc_feature (1019)..(1020): n is a, c, g, or t
  misc_feature (1025)..(1025): n is a, c, g, or t
  misc_feature (1032)..(1035): n is a, c, g, or t
  misc_feature (1037)..(1037): n is a, c, g, or t
  misc_feature (1040)..(1040): n is a, c, g, or t
  misc_feature (1044)..(1044): n is a, c, g, or t
  misc_feature (1050)..(1050): n is a, c, g, or t
  misc_feature (1054)..(1054): n is a, c, g, or t
  misc_feature (1056)..(1057): n is a, c, g, or t
  misc_feature (1059)..(1060): n is a, c, g, or t
  misc_feature (1070)..(1070): n is a, c, g, or t
  misc_feature (1072)..(1072): n is a, c, g, or t
  misc_feature (1077)..(1077): n is a, c, g, or t
  misc_feature (1080)..(1080): n is a, c, g, or t
  misc_feature (1083)..(1083): n is a, c, g, or t
  misc_feature (1086)..(1086): n is a, c, g, or t
  misc_feature (1090)..(1090): n is a, c, g, or t
  misc_feature (1095)..(1096): n is a, c, g, or t
  misc_feature (1100)..(1100): n is a, c, g, or t
  misc_feature (1102)..(1102): n is a, c, g, or t
  misc_feature (1108)..(1108): n is a, c, g, or t
  misc_feature (1110)..(1110): n is a, c, g, or t
  misc_feature (1112)..(1113): n is a, c, g, or t
  misc_feature (1117)..(1118): n is a, c, g, or t
  misc_feature (1123)..(1124): n is a, c, g, or t
  misc_feature (1132)..(1134): n is a, c, g, or t
  misc_feature (1138)..(1139): n is a, c, g, or t
  misc_feature (1142)..(1142): n is a, c, g, or t
  misc_feature (1153)..(1153): n is a, c, g, or t
  misc_feature (1156)..(1157): n is a, c, g, or t
  misc_feature (1162)..(1162): n is a, c, g, or t
  misc_feature (1164)..(1164): n is a, c, g, or t
  misc_feature (1168)..(1168): n is a, c, g, or t
  misc_feature (1171)..(1171): n is a, c, g, or t
  misc_feature (1174)..(1174): n is a, c, g, or t
  misc_feature (1179)..(1180): n is a, c, g, or t
  misc_feature (1182)..(1182): n is a, c, g, or t
  misc_feature (1192)..(1192): n is a, c, g, or t
  misc_feature (1197)..(1197): n is a, c, g, or t
  misc_feature (1199)..(1199): n is a, c, g, or t
  misc_feature (1204)..(1204): n is a, c, g, or t
  misc_feature (1207)..(1207): n is a, c, g, or t
  misc_feature (1209)..(1211): n is a, c, g, or t
  misc_feature (1217)..(1217): n is a, c, g, or t
  misc_feature (1222)..(1222): n is a, c, g, or t
  misc_feature (1225)..(1225): n is a, c, g, or t
  misc_feature (1230)..(1231): n is a, c, g, or t
  misc_feature (1238)..(1238): n is a, c, g, or t
  misc_feature (1241)..(1241): n is a, c, g, or t
  misc_feature (1244)..(1244): n is a, c, g, or t
  misc_feature (1246)..(1246): n is a, c, g, or t
  misc_feature (1249)..(1249): n is a, c, g, or t
  misc_feature (1252)..(1253): n is a, c, g, or t
  misc_feature (1263)..(1265): n is a, c, g, or t
  misc_feature (1271)..(1271): n is a, c, g, or t
  misc_feature (1273)..(1274): n is a, c, g, or t
  misc_feature (1279)..(1279): n is a, c, g, or t
  misc_feature (1282)..(1282): n is a, c, g, or t
  misc_feature (1284)..(1284): n is a, c, g, or t
  misc_feature (1293)..(1294): n is a, c, g, or t
  misc_feature (1296)..(1296): n is a, c, g, or t
  misc_feature (1308)..(1308): n is a, c, g, or t
  misc_feature (1328)..(1328): n is a, c, g, or t
  misc_feature (1342)..(1342): n is a, c, g, or t
  misc_feature (1344)..(1346): n is a, c, g, or t
  misc_feature (1350)..(1351): n is a, c, g, or t
  misc_feature (1361)..(1361): n is a, c, g, or t
  misc_feature (1366)..(1366): n is a, c, g, or t
  misc_feature (1368)..(1368): n is a, c, g, or t
  misc_feature (1373)..(1373): n is a, c, g, or t
  misc_feature (1380)..(1380): n is a, c, g, or t
  misc_feature (1384)..(1385): n is a, c, g, or t
  misc_feature (1398)..(1398): n is a, c, g, or t
  misc_feature (1409)..(1409): n is a, c, g, or t
  misc_feature (1415)..(1415): n is a, c, g, or t
  misc_feature (1419)..(1420): n is a, c, g, or t
  misc_feature (1427)..(1427): n is a, c, g, or t
  misc_feature (1429)..(1430): n is a, c, g, or t
  misc_feature (1440)..(1440): n is a, c, g, or t
  misc_feature (1444)..(1444): n is a, c, g, or t
  misc_feature (1446)..(1446): n is a, c, g, or t
  misc_feature (1451)..(1454): n is a, c, g, or t
  misc_feature (1460)..(1460): n is a, c, g, or t
nnnnnnnncantagagaaattnntatgagaggatcgcatctccatcaccatcacgggatcctatttaggtganactatagaatcgtcgacccacgcgtccgcccacgcgtccgcccacgcgtccgcccacgcgtccgcccacgcgtccgcggacgcgtgggcgcagtaccgcagccaccctgtggacgtgtatgccggcttcctcatcggggcgggcatcgctgcctacctggcctgccacgcggtgggcaacttccaggccccacctgcanagaagcccgcggccccggcccccgccaaggacgcgctgcgggccctgacgcagcggggccacgactcggtttatcagcagaataagtcggtgagcaccgacnanctggggcccccanggcggctggagggcgcgccccggcccgtggcccgcgagaanacctcnctgggcagnctgaagcgcgccagcgtggacgtggacctgctggccccgcgcaaccccatggncaaggagaacatggtgaccttcanccattacgctgcccagggccagcgcgccctcgctggacnaccccgcgcgccgccacatgaccatccanntgcngctggactcctcgcgntccaagcagctnatcagcnantgnaaannagaanancntggagggncncngnctggggatgcncnaanacgccagccccngnaanntgcncgcgcctgccnaaaccatggtntgaanangantaanaaaaggatgactaanannnatangagnatttantataaaanaagnatnactagggcncggcacnnntcnancnntntatcnnaataagtgnaaggnacgnnncgnganttnngaccntnanatcattttttncannccnntcataangnnnntacttntanangtttcaanttccannaatnagtntccattaattatnnntcnggaantgtttcccnanatantnatttcccnaggnttnttntttnttnntntntntntaantnnncnaaaaaaaaangnnatctngtaattnnnnancantttntcacanaatntnnanntttatttcanantttcnaanttnatnaatnatttnntttncntaaggnanannatannagtcnnaaattttnnntttnnttnaaaacaaaatntcnntaaananttanttnatncatanntntagaattttntaaananttatntcnannnttatancatanganttaanncatctanttnaananttnaannaattttctannnccttanannaaaancananttttatatnncnttatctataagnaatataattcaaaaccttanattaaaatctatantnnncatnntattttatanttatntntaacnattatanaatnnattttaatatatnatacttttatnttaaanatannaattttntnntatataatantatnantatannnnttaatnatca

SEQ ID NO: 486 - DNA, 1217 bp, Homo Sapiens
  misc_feature (310)..(310): n is a, c, g, or t
  misc_feature (323)..(323): n is a, c, g, or t
  misc_feature (339)..(340): n is a, c, g, or t
  misc_feature (347)..(347): n is a, c, g, or t
  misc_feature (392)..(392): n is a, c, g, or t
  misc_feature (397)..(397): n is a, c, g, or t
  misc_feature (401)..(401): n is a, c, g, or t
  misc_feature (404)..(404): n is a, c, g, or t
  misc_feature (413)..(413): n is a, c, g, or t
  misc_feature (427)..(428): n is a, c, g, or t
  misc_feature (433)..(433): n is a, c, g, or t
  misc_feature (435)..(435): n is a, c, g, or t
  misc_feature (466)..(466): n is a, c, g, or t
  misc_feature (481)..(481): n is a, c, g, or t
  misc_feature (489)..(489): n is a, c, g, or t
  misc_feature (500)..(500): n is a, c, g, or t
  misc_feature (502)..(502): n is a, c, g, or t
  misc_feature (512)..(512): n is a, c, g, or t
  misc_feature (518)..(518): n is a, c, g, or t
  misc_feature (525)..(525): n is a, c, g, or t
  misc_feature (535)..(535): n is a, c, g, or t
  misc_feature (551)..(552): n is a, c, g, or t
  misc_feature (554)..(554): n is a, c, g, or t
  misc_feature (559)..(559): n is a, c, g, or t
  misc_feature (563)..(563): n is a, c, g, or t
  misc_feature (580)..(580): n is a, c, g, or t
  misc_feature (585)..(585): n is a, c, g, or t
  misc_feature (588)..(589): n is a, c, g, or t
  misc_feature (602)..(602): n is a, c, g, or t
  misc_feature (604)..(606): n is a, c, g, or t
  misc_feature (610)..(613): n is a, c, g, or t
  misc_feature (616)..(616): n is a, c, g, or t
  misc_feature (630)..(630): n is a, c, g, or t
  misc_feature (633)..(633): n is a, c, g, or t
  misc_feature (647)..(648): n is a, c, g, or t
  misc_feature (654)..(656): n is a, c, g, or t
  misc_feature (661)..(661): n is a, c, g, or t
  misc_feature (678)..(678): n is a, c, g, or t
  misc_feature (684)..(684): n is a, c, g, or t
  misc_feature (687)..(687): n is a, c, g, or t
  misc_feature (691)..(692): n is a, c, g, or t
  misc_feature (702)..(703): n is a, c, g, or t
  misc_feature (705)..(705): n is a, c, g, or t
  misc_feature (707)..(707): n is a, c, g, or t
  misc_feature (715)..(715): n is a, c, g, or t
  misc_feature (723)..(723): n is a, c, g, or t
  misc_feature (731)..(731): n is a, c, g, or t
  misc_feature (745)..(745): n is a, c, g, or t
  misc_feature (749)..(751): n is a, c, g, or t
  misc_feature (753)..(753): n is a, c, g, or t
  misc_feature (759)..(759): n is a, c, g, or t
  misc_feature (761)..(762): n is a, c, g, or t
  misc_feature (767)..(768): n is a, c, g, or t
  misc_feature (773)..(774): n is a, c, g, or t
  misc_feature (779)..(780): n is a, c, g, or t
  misc_feature (788)..(793): n is a, c, g, or t
  misc_feature (798)..(798): n is a, c, g, or t
  misc_feature (803)..(804): n is a, c, g, or t
  misc_feature (806)..(808): n is a, c, g, or t
  misc_feature (822)..(823): n is a, c, g, or t
  misc_feature (825)..(825): n is a, c, g, or t
  misc_feature (827)..(828): n is a, c, g, or t
  misc_feature (837)..(837): n is a, c, g, or t
  misc_feature (840)..(840): n is a, c, g, or t
  misc_feature (845)..(845): n is a, c, g, or t
  misc_feature (847)..(847): n is a, c, g, or t
  misc_feature (859)..(860): n is a, c, g, or t
  misc_feature (870)..(877): n is a, c, g, or t
  misc_feature (879)..(879): n is a, c, g, or t
  misc_feature (884)..(884): n is a, c, g, or t
  misc_feature (889)..(889): n is a, c, g, or t
  misc_feature (891)..(891): n is a, c, g, or t
  misc_feature (893)..(897): n is a, c, g, or t
  misc_feature (914)..(915): n is a, c, g, or t
  misc_feature (929)..(932): n is a, c, g, or t
  misc_feature (941)..(941): n is a, c, g, or t
  misc_feature (943)..(943): n is a, c, g, or t
  misc_feature (954)..(970): n is a, c, g, or t
  misc_feature (980)..(980): n is a, c, g, or t
  misc_feature (991)..(993): n is a, c, g, or t
  misc_feature (995)..(1000): n is a, c, g, or t
  misc_feature (1003)..(1006): n is a, c, g, or t
  misc_feature (1009)..(1014): n is a, c, g, or t
  misc_feature (1023)..(1023): n is a, c, g, or t
  misc_feature (1037)..(1038): n is a, c, g, or t
  misc_feature (1047)..(1061): n is a, c, g, or t
  misc_feature (1063)..(1064): n is a, c, g, or t
  misc_feature (1076)..(1078): n is a, c, g, or t
  misc_feature (1092)..(1114): n is a, c, g, or t
  misc_feature (1122)..(1124): n is a, c, g, or t
  misc_feature (1132)..(1132): n is a, c, g, or t
  misc_feature (1134)..(1170): n is a, c, g, or t
  misc_feature (1180)..(1181): n is a, c, g, or t
  misc_feature (1184)..(1197): n is a, c, g, or t
  misc_feature (1202)..(1202): n is a, c, g, or t
  misc_feature (1204)..(1205): n is a, c, g, or t
  misc_feature (1217)..(1217): n is a, c, g, or t
tagagaaattactatgagaggatcgcatcaccatcaccatcacggatcctatttaggtgacactatagaatcgtcgacccacgcgtccgggagaagtggtgaaaaggtcccgtttgtgcagacatattccttgagagcatttgagaaaccccctcaggtacagacccaggctcttcgagactttgagaagcacctcaatgacctgaagaaggagaacttcagcctcaagctgcgcatctacttcctggaggagcgcatgcaacagaagtatgaggccagccgggaggacatctacaagcggaacactganctgaaggttgaantggaaagcttgaaccnnaactccnggacaaaaacagcctctggataaaacatgggctgagggggaaatnccacngtcnaanggaactgantcccaccccctttnnggacncnccccggaacggacctgtttttaacccttggnaaaaaaaaggccctnccgggggngaatccccccnanaaaaaaaaancccccnggagggncccttggggnaaaaaaaaaggggttnncngggcncccncaaaaaatggggggggnccccnaanntggggaaattttncnnnaaannnnttnccccccaaaaaaanttnggggcctgcccaannaaaaannnccccncccccccccccgggggngacccnctnttgnngggggaaaannanancccccccnaaaaaaangggggggnaaaaaaaaaaaaancccnnnantttttntnnttttnnaaaannccccnntttttttnnnnnnccccnaaaanngnnncccccccccccccnnangnnttttttttnccnaaaantntttttttttttnncccccccccnnnnnnnngnggggnggggngngnnnnnaaaaaaaaaaaaaaaannccccccccccctcnnnnaaaaaaaantnttttttttttnnnnnnnnnnnnnnnnncccccccccnaaaaaaaaaannntnnnnnnttnnnnttnnnnnnaaaaaaaangggggggggggggnnccccccccnnnnnnnnnnnnnnntnntttttttttttnnnaaaaaaaaaaaaannnnnnnnnnnnnnnnnnnnnnncccccccnnntttttttntnnnnnnnnnnnnnnnnnnnnnnnnnnnnnnnnnnnnnaaaaaaaaannaannnnnnnnnnnnnnccccncnntttttttttttn

SEQ ID NO: 487 - DNA, 1320 bp, Homo Sapiens
  misc_feature (1)..(1): n is a, c, g, or t
  misc_feature (863)..(863): n is a, c, g, or t
  misc_feature (886)..(886): n is a, c, g, or t
  misc_feature (893)..(893): n is a, c, g, or t
  misc_feature (933)..(933): n is a, c, g, or t
  misc_feature (943)..(943): n is a, c, g, or t
  misc_feature (947)..(947): n is a, c, g, or t
  misc_feature (960)..(960): n is a, c, g, or t
  misc_feature (962)..(962): n is a, c, g, or t
  misc_feature (981)..(981): n is a, c, g, or t
  misc_feature (1002)..(1002): n is a, c, g, or t
  misc_feature (1016)..(1016): n is a, c, g, or t
  misc_feature (1023)..(1023): n is a, c, g, or t
  misc_feature (1026)..(1026): n is a, c, g, or t
  misc_feature (1032)..(1032): n is a, c, g, or t
  misc_feature (1035)..(1035): n is a, c, g, or t
  misc_feature (1041)..(1043): n is a, c, g, or t
  misc_feature (1053)..(1053): n is a, c, g, or t
  misc_feature (1057)..(1057): n is a, c, g, or t
  misc_feature (1076)..(1076): n is a, c, g, or t
  misc_feature (1085)..(1085): n is a, c, g, or t
  misc_feature (1088)..(1088): n is a, c, g, or t
  misc_feature (1099)..(1100): n is a, c, g, or t
  misc_feature (1110)..(1110): n is a, c, g, or t
  misc_feature (1119)..(1119): n is a, c, g, or t
  misc_feature (1122)..(1122): n is a, c, g, or t
  misc_feature (1139)..(1139): n is a, c, g, or t
  misc_feature (1153)..(1153): n is a, c, g, or t
  misc_feature (1155)..(1155): n is a, c, g, or t
  misc_feature (1180)..(1180): n is a, c, g, or t
  misc_feature (1182)..(1182): n is a, c, g, or t
  misc_feature (1198)..(1198): n is a, c, g, or t
  misc_feature (1201)..(1201): n is a, c, g, or t
  misc_feature (1209)..(1209): n is a, c, g, or t
  misc_feature (1229)..(1229): n is a, c, g, or t
  misc_feature (1235)..(1236): n is a, c, g, or t
  misc_feature (1251)..(1251): n is a, c, g, or t
  misc_feature (1264)..(1265): n is a, c, g, or t
  misc_feature (1267)..(1267): n is a, c, g, or t
  misc_feature (1280)..(1281): n is a, c, g, or t
  misc_feature (1292)..(1292): n is a, c, g, or t
  misc_feature (1294)..(1294): n is a, c, g, or t
  misc_feature (1301)..(1301): n is a, c, g, or t
  misc_feature (1304)..(1304): n is a, c, g, or t
  misc_feature (1306)..(1306): n is a, c, g, or t
  misc_feature (1308)..(1308): n is a, c, g, or t
  misc_feature (1314)..(1314): n is a, c, g, or t
naatagaggaaaattactatgagaggatcgcatcaccatcaccagtcacggatcctatttagggtgacactatagaatcgtcgacccacgcgatccgcccacgcgtccggatgtagttttctctgcgcgtgtgcgttttccctcctcccccgccctcagggtccacggccaccatggcgtattaggggcagcagtgcctgcggcagcattggcctttgcagcggcggcagcagcaccaggctctgcagcggcaacccccagcggcttaagccatggcgcttctcacggcattcagcagcagcgttgctgtaaccgacaaagacaccttcgaattaagcacattcctcgattccagcaaagcaccgcaacatgaccgaaatgagcttcctgagcagcgaggtgttggtgggggacttgatgtcccccttcgacccgtcgggtttgggggctgaagaaagcctaggtctcttagatgattacctggaggtggccaagcacttcaaacctcatgggttctccagcgacaaggctaaggcgggctcctccgaatggctggctgtggatgggttggtcagtccctccaacaacagcaaggaggatgccttctccgggacagattggatgttggagaaaatggatttgaaggagttcgacttggatgccctgttgggtatagatgacctggaaaccatgccagatgaccttctgaccacgttggatgacacttgtgatctctttgcccccctagtccaggagactaataagcagcccccccagacggtgaacccaattggccatctcccagaaagtttaacaaaacccgaccaggttgcccccttcaccttcttacaacctcttccccntttccccaggggtcctgtcctcnactccanatcatttcctttagtttaaagctgggcagtgaaagtgganatcactgaangganatagggaagccanantaaaactgcttaacgttgnccatgattccctcaggggcanaaaagaaggaaaanacccccnttncaaaanaangaaaannngggtatctgnaatnaacccaaaaattcttaatntggggggtntcnttcaaaaaaannccccttttancaaaggggnttntccaaaaaaaaaaaccntccccatctccaangngttttcttttggggggtttgccccntnccaaaactttaaaaantcnttcttggnaaaaaaaatggtaacccccnaaaaannaagggggggaaaaantgggaaaaaaaanntnaaaaaaatggggnnaaaaaaaaaancnccccccntangntncccccnaaaaaa

SEQ ID NO: 488 - DNA, 1351 bp, Homo Sapiens
  misc_feature (3)..(3): n is a, c, g, or t
  misc_feature (590)..(590): n is a, c, g, or t
  misc_feature (649)..(649): n is a, c, g, or t
  misc_feature (674)..(674): n is a, c, g, or t
  misc_feature (730)..(730): n is a, c, g, or t
  misc_feature (736)..(736): n is a, c, g, or t
  misc_feature (738)..(738): n is a, c, g, or t
  misc_feature (742)..(742): n is a, c, g, or t
  misc_feature (755)..(755): n is a, c, g, or t
  misc_feature (764)..(764): n is a, c, g, or t
  misc_feature (784)..(784): n is a, c, g, or t
  misc_feature (844)..(844): n is a, c, g, or t
  misc_feature (866)..(866): n is a, c, g, or t
  misc_feature (869)..(870): n is a, c, g, or t
  misc_feature (873)..(873): n is a, c, g, or t
  misc_feature (882)..(882): n is a, c, g, or t
  misc_feature (888)..(888): n is a, c, g, or t
  misc_feature (903)..(903): n is a, c, g, or t
  misc_feature (908)..(910): n is a, c, g, or t
  misc_feature (912)..(912): n is a, c, g, or t
  misc_feature (917)..(918): n is a, c, g, or t
  misc_feature (922)..(924): n is a, c, g, or t
  misc_feature (926)..(926): n is a, c, g, or t
  misc_feature (929)..(929): n is a, c, g, or t
  misc_feature (932)..(934): n is a, c, g, or t
  misc_feature (936)..(936): n is a, c, g, or t
  misc_feature (941)..(942): n is a, c, g, or t
  misc_feature (945)..(945): n is a, c, g, or t
  misc_feature (948)..(952): n is a, c, g, or t
  misc_feature (954)..(954): n is a, c, g, or t
  misc_feature (956)..(957): n is a, c, g, or t
  misc_feature (959)..(962): n is a, c, g, or t
  misc_feature (964)..(969): n is a, c, g, or t
  misc_feature (971)..(975): n is a, c, g, or t
  misc_feature (977)..(977): n is a, c, g, or t
  misc_feature (982)..(983): n is a, c, g, or t
  misc_feature (986)..(987): n is a, c, g, or t
  misc_feature (991)..(991): n is a, c, g, or t
  misc_feature (994)..(995): n is a, c, g, or t
  misc_feature (997)..(999): n is a, c, g, or t
  misc_feature (1002)..(1006): n is a, c, g, or t
  misc_feature (1008)..(1010): n is a, c, g, or t
  misc_feature (1013)..(1018): n is a, c, g, or t
  misc_feature (1021)..(1021): n is a, c, g, or t
  misc_feature (1023)..(1025): n is a, c, g, or t
  misc_feature (1027)..(1027): n is a, c, g, or t
  misc_feature (1031)..(1034): n is a, c, g, or t
  misc_feature (1038)..(1038): n is a, c, g, or t
  misc_feature (1042)..(1042): n is a, c, g, or t
  misc_feature (1044)..(1045): n is a, c, g, or t
  misc_feature (1047)..(1079): n is a, c, g, or t
  misc_feature (1082)..(1096): n is a, c, g, or t
  misc_feature (1098)..(1107): n is a, c, g, or t
  misc_feature (1111)..(1125): n is a, c, g, or t
  misc_feature (1128)..(1133): n is a, c, g, or t
  misc_feature (1136)..(1147): n is a, c, g, or t
  misc_feature (1151)..(1154): n is a, c, g, or t
  misc_feature (1157)..(1272): n is a, c, g, or t
  misc_feature (1274)..(1351): n is a, c, g, or t
tanatagagaaattactatgagaggatcgcatcaccatcaccatcacggatcctatttaggtgacactatagaatcgtcgacccacgcgtccgggatggagaaggccttgagtcaattggccctgcgctctgctgcgcccagcagccccgggtctcccaggccagcactgccggctaccccaccagccaccccgcctgcagcctctcccagtgctctgaagggggtgtcccaggatctgctggagcggatccgagccaaggaggcacagaagcagctggcacagatgacgcggtgcccggagcaggagcagcggctgcagcgcttagaacggctgcctgagctggcccgcgtgctgcggagcgtctttgtgtccgaacgcaagcctgcgctcagcatggaggtggcctgtgccaggatggtgggcagctgttgtactatcatgagccctggggaaatggagaagcacctgctgctcctctccgagctgctgccggactggctcagcctccaccgcatccgcaccgacacctacgtcaagctggacaaggccgcggacctcgcccacatcactgcacgcctggcccaccanacacgtgctgaggaggggctgtgagcctgggggccactgtggacagacgtgggcttcanaagctcgctggcctgggcccaccancattttcttttatgaacatgatacactttggccttcctttccccatggcccctganggccanangcanatgtgggctgcangctgcacancccgagggtctctggctgcnggcggtgggccccttcatggggctcacctggtggattcacattaaaccggtttctgtggncacctctgtccttgctgctggnggnnaanggaaaccanatccancaccccctggggggncatcnnnantgtgnntggnnntnaanggnnntntgtgnnaanatnnnnntngnnannnngnnnnnnannnnntnccctnnaannttgnaanntnnnaannnnnannnccnnnnnnaangnnnantttnnnntaanaaananngnnnnnnnnnnnnnnnnnnnnnnnnnnnnnnnnnttnnnnnnnnnnnnnnnannnnnnnnnnaaannnnnnnnnnnnnnnaannnnnnaannnnnnnnnnnnaaannnnaannnnnnnnnnnnnnnnnnnnnnnnnnnnnnnnnnnnnnnnnnnnnnnnnnnnnnnnnnnnnnnnnnnnnnnnnnnnnnnnnnnnnnnnnnnnnnnnnnnnnnnnnnnnnnnnnnnnannnnnnnnnnnnnnnnnnnnnnnnnnnnnnnnnnnnnnnnnnnnnnnnnnnnnnnnnnnnnnnnnnnnnnnnnnnnnn

SEQ ID NO: 489 - DNA, 1405 bp, Homo Sapiens
  misc_feature (853)..(853): n is a, c, g, or t
  misc_feature (868)..(868): n is a, c, g, or t
  misc_feature (904)..(904): n is a, c, g, or t
  misc_feature (911)..(911): n is a, c, g, or t
  misc_feature (920)..(920): n is a, c, g, or t
  misc_feature (948)..(948): n is a, c, g, or t
  misc_feature (955)..(955): n is a, c, g, or t
  misc_feature (959)..(959): n is a, c, g, or t
  misc_feature (969)..(969): n is a, c, g, or t
  misc_feature (979)..(979): n is a, c, g, or t
  misc_feature (984)..(984): n is a, c, g, or t
  misc_feature (986)..(986): n is a, c, g, or t
  misc_feature (993)..(993): n is a, c, g, or t
  misc_feature (1012)..(1012): n is a, c, g, or t
  misc_feature (1027)..(1027): n is a, c, g, or t
  misc_feature (1029)..(1029): n is a, c, g, or t
  misc_feature (1031)..(1031): n is a, c, g, or t
  misc_feature (1034)..(1034): n is a, c, g, or t
  misc_feature (1047)..(1074): n is a, c, g, or t
  misc_feature (1076)..(1077): n is a, c, g, or t
  misc_feature (1079)..(1079): n is a, c, g, or t
  misc_feature (1081)..(1083): n is a, c, g, or t
  misc_feature (1085)..(1085): n is a, c, g, or t
  misc_feature (1088)..(1088): n is a, c, g, or t
  misc_feature (1092)..(1092): n is a, c, g, or t
  misc_feature (1095)..(1099): n is a, c, g, or t
  misc_feature (1106)..(1106): n is a, c, g, or t
  misc_feature (1110)..(1110): n is a, c, g, or t
  misc_feature (1114)..(1116): n is a, c, g, or t
  misc_feature (1119)..(1119): n is a, c, g, or t
  misc_feature (1122)..(1122): n is a, c, g, or t
  misc_feature (1127)..(1127): n is a, c, g, or t
  misc_feature (1131)..(1132): n is a, c, g, or t
  misc_feature (1137)..(1141): n is a, c, g, or t
  misc_feature (1143)..(1144): n is a, c, g, or t
  misc_feature (1147)..(1149): n is a, c, g, or t
  misc_feature (1153)..(1154): n is a, c, g, or t
  misc_feature (1163)..(1163): n is a, c, g, or t
  misc_feature (1170)..(1170): n is a, c, g, or t
  misc_feature (1174)..(1176): n is a, c, g, or t
  misc_feature (1178)..(1178): n is a, c, g, or t
  misc_feature (1180)..(1180): n is a, c, g, or t
  misc_feature (1182)..(1183): n is a, c, g, or t
  misc_feature (1186)..(1187): n is a, c, g, or t
  misc_feature (1191)..(1191): n is a, c, g, or t
  misc_feature (1199)..(1199): n is a, c, g, or t
  misc_feature (1202)..(1202): n is a, c, g, or t
  misc_feature (1208)..(1208): n is a, c, g, or t
  misc_feature (1210)..(1214): n is a, c, g, or t
  misc_feature (1218)..(1220): n is a, c, g, or t
  misc_feature (1222)..(1222): n is a, c, g, or t
  misc_feature (1227)..(1227): n is a, c, g, or t
  misc_feature (1229)..(1230): n is a, c, g, or t
  misc_feature (1232)..(1238): n is a, c, g, or t
  misc_feature (1242)..(1242): n is a, c, g, or t
  misc_feature (1244)..(1244): n is a, c, g, or t
  misc_feature (1251)..(1254): n is a, c, g, or t
  misc_feature (1256)..(1257): n is a, c, g, or t
  misc_feature (1259)..(1261): n is a, c, g, or t
  misc_feature (1263)..(1265): n is a, c, g, or t
  misc_feature (1268)..(1268): n is a, c, g, or t
  misc_feature (1272)..(1272): n is a, c, g, or t
  misc_feature (1274)..(1276): n is a, c, g, or t
  misc_feature (1278)..(1283): n is a, c, g, or t
  misc_feature (1293)..(1293): n is a, c, g, or t
  misc_feature (1295)..(1296): n is a, c, g, or t
  misc_feature (1300)..(1313): n is a, c, g, or t
  misc_feature (1315)..(1315): n is a, c, g, or t
  misc_feature (1317)..(1329): n is a, c, g, or t
  misc_feature (1332)..(1334): n is a, c, g, or t
  misc_feature (1339)..(1339): n is a, c, g, or t
  misc_feature (1342)..(1343): n is a, c, g, or t
  misc_feature (1352)..(1355): n is a, c, g, or t
  misc_feature (1359)..(1362): n is a, c, g, or t
  misc_feature (1371)..(1375): n is a, c, g, or t
  misc_feature (1378)..(1384): n is a, c, g, or t
  misc_feature (1386)..(1391): n is a, c, g, or t
  misc_feature (1393)..(1401): n is a, c, g, or t
  misc_feature (1403)..(1405): n is a, c, g, or t
tagagaaattactatgagaggatcgcatcaccatcaccatcacggatcctatttaggtgacactatagaatcgtcgacccacgcgtccgctcccgcagccgcagccgccgtgctcagcgcgagccccggagcccttgagcgcgaggcgcggagcccccggagcccccaaaccgcagacacatccccgcgccccagagccccggcctgcgcgcccagccgggcccgcgcgatgccctcagaccggcctttcaagcagcggcggagcttcgccgaccgctgtaaggaggtacagcagatccgcgaccagcaccccagcaaaatcccggtgatcatcgagcgctacaagggtgagaagcagctgcccgtcctggacaagaccaagtttttggtcccggaccatgtcaacatgagcgagttggtcaagatcatccggcgccgcctgcagctgaaccccacgcaggccttcttcctgctggtgaaccagcacagcatggtgagtgtgtccacgcccatcgcggacatctacgagcaggagaaagacgaggacggcttcctctatatggtctacgcctcccaggaaaccttcggcttctgagccagcagtaggggggctcggcctgggagtcggggggccccggtcaggccctgcccagagagctcctggttcctgaactgagctgcctctaccgtggtgggctgggcaggcatgtgcccccctagtcagagggcaccaacccacctactctgcccctgggtggatcctgggccggtcgtgttagggttgtccctctgggtgctggctggtgggatgggggagggtggggagcaactcccagcacccctgctgtgtggntcatcttttttttangccccctgcctgtctgcccatctgcccctcacccanccgaggntctgcccancgcctggaactgcccacccctgaaaaantggcccntggntccccgcccntttgttttcngtggngnaaggatntggggtcattgtccctttnaaaaaaaaaaattgntnangcntgcttgaaaaaannnnnnnnnnnnnnnnnnnnnnnnnnnngnngncnnntnccnatanggnnnnnaattaantttnatannnaanttngatcntttnnaaaannnnnannacnnnaaannccttttganttttttnaaannntngntnnccnngggntttttttnggnaaatcnannnnnttgnnnanttttngnntnnnnnnntaangnaaaaaannnngnnannncnnntanattncnnngnnnnnnaaaaattttngnntttnnnnnnnnnnnnnnanannnnnnnnnnnnntannnttttnaannaaaaaaaannnntttnnnnttttttttnnnnnaannnnnnntnnnnnnannnnnnnnntnnn

SEQ ID NO: 490 - DNA, 1338 bp, Homo Sapiens
  misc_feature (7)..(7): n is a, c, g, or t
  misc_feature (888)..(888): n is a, c, g, or t
  misc_feature (913)..(913): n is a, c, g, or t
  misc_feature (919)..(919): n is a, c, g, or t
  misc_feature (926)..(926): n is a, c, g, or t
  misc_feature (963)..(963): n is a, c, g, or t
  misc_feature (977)..(977): n is a, c, g, or t
  misc_feature (991)..(991): n is a, c, g, or t
  misc_feature (993)..(993): n is a, c, g, or t
  misc_feature (1003)..(1003): n is a, c, g, or t
  misc_feature (1022)..(1022): n is a, c, g, or t
  misc_feature (1030)..(1030): n is a, c, g, or t
  misc_feature (1033)..(1033): n is a, c, g, or t
  misc_feature (1047)..(1047): n is a, c, g, or t
  misc_feature (1066)..(1066): n is a, c, g, or t
  misc_feature (1069)..(1069): n is a, c, g, or t
  misc_feature (1071)..(1071): n is a, c, g, or t
  misc_feature (1074)..(1074): n is a, c, g, or t
  misc_feature (1088)..(1088): n is a, c, g, or t
  misc_feature (1097)..(1097): n is a, c, g, or t
  misc_feature (1102)..(1102): n is a, c, g, or t
  misc_feature (1106)..(1106): n is a, c, g, or t
  misc_feature (1115)..(1115): n is a, c, g, or t
  misc_feature (1118)..(1118): n is a, c, g, or t
  misc_feature (1126)..(1126): n is a, c, g, or t
  misc_feature (1134)..(1134): n is a, c, g, or t
  misc_feature (1143)..(1143): n is a, c, g, or t
  misc_feature (1150)..(1150): n is a, c, g, or t
  misc_feature (1156)..(1156): n is a, c, g, or t
  misc_feature (1176)..(1176): n is a, c, g, or t
  misc_feature (1182)..(1182): n is a, c, g, or t
  misc_feature (1189)..(1189): n is a, c, g, or t
  misc_feature (1203)..(1204): n is a, c, g, or t
  misc_feature (1206)..(1206): n is a, c, g, or t
  misc_feature (1212)..(1212): n is a, c, g, or t
  misc_feature (1219)..(1219): n is a, c, g, or t
  misc_feature (1222)..(1222): n is a, c, g, or t
  misc_feature (1224)..(1225): n is a, c, g, or t
  misc_feature (1229)..(1229): n is a, c, g, or t
  misc_feature (1234)..(1234): n is a, c, g, or t
  misc_feature (1239)..(1239): n is a, c, g, or t
  misc_feature (1243)..(1243): n is a, c, g, or t
  misc_feature (1262)..(1262): n is a, c, g, or t
  misc_feature (1275)..(1275): n is a, c, g, or t
  misc_feature (1284)..(1284): n is a, c, g, or t
  misc_feature (1311)..(1311): n is a, c, g, or t
  misc_feature (1321)..(1321): n is a, c, g, or t
  misc_feature (1330)..(1330): n is a, c, g, or t
tagaggnaattactatgagaggatcgcatcaccatcaccatcacgggatcctatttaggtgacactatagaatcgtcgacccacgcgtccggatggctgctgggcgaccacttcctgacagaagaaaagatgtggagtgggctgctacctcctggcctaaatgaaagtgacgctgagtcaaactcggaagatgaagctacgttggagaactctggacttaacttacaggaagataaagaggatgagagcatcagaaaaacagaaatcatagatttctcaacagatgaaccaaaaactgaaacagagtcaaatgtaaatgcctatgaagagtgtccttctggaattcccatagatatgtggaataaatttcaagaattgcataaaaaacattctgaacagaaaagcacaacctcaagattcagagggaaaagaagaaaacgctccagaaaagataaattgaagaatgaaaaagaattacatagtgaaccgtcctcaaatgaaacccagtggaaagagcttactcagtattttggagtcaatgatagatttgacccgcctgttaaaaggaaaaaagttgagaagtcaggccttgaaaagaggatagaccaggctgtggaggagtggaatattgagaaggctgaggaactcagcaaccagctagctactcgagagcttggtgtaaaaattgccaaagcagttgcctgccacaactttgtaaaagccaaaaaggaggttgaaaattcacaggctgcccgaaaaaagaagaaacttgcatgggggtttgaagcaaagaagagatgggaaaccaaaagcaacatgggatacatgtaacttgccagagtgcttcaagacatttgtagactcaaatgctcaatttactgagaatgntttcctgcctatgttaatatgtcanaaaatngatagcnctaaaacaaaataagcataaaatttgggattttgatnatcagctcttttcngtctttctttaagnanttgtcctatngaagtgaataaatgaagcnttctgttnttngtttagaaatgttngaaaaaaattttgaagganagntnggntttgttttttgtangggggaccntggtnaaancccttttgngcnttccttcnttggttanccagccggnacttccnaatttnttctttttttttttttgganaaaccnccttgtntttcccccgctaanngnaaaccnatttggnccngnncccngttcngggtnaggntcccgcccccccccggaancgggattggaaancccccccgncatttttttttttttttttaaaaaaanttttgggggncggggctcnccccccca

SEQ ID NO: 491 - DNA, 1343 bp, Homo Sapiens
  misc_feature (748)..(748): n is a, c, g, or t
  misc_feature (775)..(775): n is a, c, g, or t
  misc_feature (813)..(813): n is a, c, g, or t
  misc_feature (820)..(820): n is a, c, g, or t
  misc_feature (845)..(845): n is a, c, g, or t
  misc_feature (879)..(879): n is a, c, g, or t
  misc_feature (887)..(887): n is a, c, g, or t
  misc_feature (901)..(901): n is a, c, g, or t
  misc_feature (912)..(912): n is a, c, g, or t
  misc_feature (930)..(930): n is a, c, g, or t
  misc_feature (934)..(934): n is a, c, g, or t
  misc_feature (936)..(936): n is a, c, g, or t
  misc_feature (943)..(943): n is a, c, g, or t
  misc_feature (954)..(954): n is a, c, g, or t
  misc_feature (969)..(969): n is a, c, g, or t
  misc_feature (971)..(972): n is a, c, g, or t
  misc_feature (974)..(974): n is a, c, g, or t
  misc_feature (977)..(977): n is a, c, g, or t
  misc_feature (999)..(999): n is a, c, g, or t
  misc_feature (1013)..(1013): n is a, c, g, or t
  misc_feature (1020)..(1020): n is a, c, g, or t
  misc_feature (1023)..(1023): n is a, c, g, or t
  misc_feature (1026)..(1027): n is a, c, g, or t
  misc_feature (1040)..(1040): n is a, c, g, or t
  misc_feature (1043)..(1043): n is a, c, g, or t
  misc_feature (1049)..(1049): n is a, c, g, or t
  misc_feature (1056)..(1056): n is a, c, g, or t
  misc_feature (1063)..(1063): n is a, c, g, or t
  misc_feature (1074)..(1074): n is a, c, g, or t
  misc_feature (1091)..(1091): n is a, c, g, or t
  misc_feature (1104)..(1105): n is a, c, g, or t
  misc_feature (1109)..(1109): n is a, c, g, or t
  misc_feature (1117)..(1118): n is a, c, g, or t
  misc_feature (1126)..(1126): n is a, c, g, or t
  misc_feature (1128)..(1128): n is a, c, g, or t
  misc_feature (1133)..(1133): n is a, c, g, or t
  misc_feature (1145)..(1145): n is a, c, g, or t
  misc_feature (1155)..(1155): n is a, c, g, or t
  misc_feature (1166)..(1170): n is a, c, g, or t
  misc_feature (1172)..(1172): n is a, c, g, or t
  misc_feature (1175)..(1175): n is a, c, g, or t
  misc_feature (1177)..(1177): n is a, c, g, or t
  misc_feature (1181)..(1182): n is a, c, g, or t
  misc_feature (1185)..(1185): n is a, c, g, or t
  misc_feature (1191)..(1191): n is a, c, g, or t
  misc_feature (1196)..(1197): n is a, c, g, or t
  misc_feature (1200)..(1200): n is a, c, g, or t
  misc_feature (1210)..(1210): n is a, c, g, or t
  misc_feature (1221)..(1221): n is a, c, g, or t
  misc_feature (1223)..(1223): n is a, c, g, or t
  misc_feature (1233)..(1235): n is a, c, g, or t
  misc_feature (1237)..(1237): n is a, c, g, or t
  misc_feature (1241)..(1241): n is a, c, g, or t
  misc_feature (1246)..(1246): n is a, c, g, or t
  misc_feature (1268)..(1268): n is a, c, g, or t
  misc_feature (1270)..(1270): n is a, c, g, or t
  misc_feature (1272)..(1272): n is a, c, g, or t
  misc_feature (1275)..(1276): n is a, c, g, or t
  misc_feature (1279)..(1279): n is a, c, g, or t
  misc_feature (1284)..(1285): n is a, c, g, or t
  misc_feature (1293)..(1293): n is a, c, g, or t
  misc_feature (1295)..(1296): n is a, c, g, or t
  misc_feature (1307)..(1311): n is a, c, g, or t
  misc_feature (1318)..(1318): n is a, c, g, or t
  misc_feature (1322)..(1322): n is a, c, g, or t
  misc_feature (1328)..(1329): n is a, c, g, or t
  misc_feature (1332)..(1333): n is a, c, g, or t
  misc_feature (1338)..(1338): n is a, c, g, or t
  misc_feature (1340)..(1343): n is a, c, g, or t
tagagaaattaactatgagaggatcgcatcaccatcaccatcacggatcctatttaggtgacactatagaatcgtcgacccacgcgtccgctctgcgcgtgtgcgttttccctcctccccgccctcagggtccacggccaccatggcgtattaggggcagcagtgcctgcggcagcattggcctttgcagcggcggcagcagcaccaggctctgcagcggcaacccccagcggcttaagccatggcgcttctcacggcattcagcagcagcgttgctgtaaccgacaaagacaccttcgaattaagcacattcctcgattccagcaaagcaccgcaacatgaccgaaatgagcttcctgagcagcgaggtgttggtgggggacttgatgtcccccttcgaccagtcgggtttgggggctgaagaaagcctaggtctcttagatgattacctggaggtggccaagcacttcaaacctcatgggttctccagcgacaaggctaaggcgggctcctccgaatggctggctgtggatgggttggtcagtccctccaacaacagcaaggaggatgccttctccgggacagattggatgttggagaaaatggatttgaaggagttcgacttggatgccctgttgggtatagatgacctggaaaccatgccagatgaccttctgaccacgttggatgacacttgtgatctctttgcccccctagtccaggagactaataagcagcccccccagangggtgaacccaattggccatctcccanaaagtttaacaaaacccgaacaggttgcccccttcacnttcttanaacctcttcccctttccccaagggntcctgtcctccactccaaaatcatttcctttaantttaaaanctgggcaagtgaantgggaaaatcnctgaaggaaaaaaggaanccanantaaactngctttaagttngccatgaatcccccnanngnaanaaaggaagaaaaaaaccccctncaaaaaaagaaaangggcatntgntannaacccaaaatccnatntggggntttcctnaaaaaancccctttaaanggggtttcccaaaaaanaaaccccccaatnnccangggttttnntggggggntngcccntcccaaaacttnaaaatctccnggaaaaaaaannnnnanccncnaaannaangggggnaaaannggnaaaaaaaccnaaaaaaatggngnaaaaaaaaannncncccntattncccccaaaaaaaaaggggaaanananggnnttntgggnnggaaaaantnnaaaaaaaaaannnnnaaaaaangggntttttnncannaaaanannnn

SEQ ID NO: 492 - DNA, 1503 bp, Homo Sapiens
  misc_feature (1)..(1): n is a, c, g, or t
  misc_feature (74)..(74): n is a, c, g, or t
  misc_feature (280)..(280): n is a, c, g, or t
  misc_feature (336)..(336): n is a, c, g, or t
  misc_feature (459)..(460): n is a, c, g, or t
  misc_feature (471)..(471): n is a, c, g, or t
  misc_feature (487)..(487): n is a, c, g, or t
  misc_feature (532)..(532): n is a, c, g, or t
  misc_feature (541)..(541): n is a, c, g, or t
  misc_feature (544)..(544): n is a, c, g, or t
  misc_feature (553)..(553): n is a, c, g, or t
  misc_feature (572)..(572): n is a, c, g, or t
  misc_feature (579)..(579): n is a, c, g, or t
  misc_feature (586)..(586): n is a, c, g, or t
  misc_feature (614)..(614): n is a, c, g, or t
  misc_feature (617)..(617): n is a, c, g, or t
  misc_feature (620)..(620): n is a, c, g, or t
  misc_feature (624)..(624): n is a, c, g, or t
  misc_feature (630)..(631): n is a, c, g, or t
  misc_feature (633)..(633): n is a, c, g, or t
  misc_feature (641)..(641): n is a, c, g, or t
  misc_feature (643)..(644): n is a, c, g, or t
  misc_feature (647)..(649): n is a, c, g, or t
  misc_feature (651)..(651): n is a, c, g, or t
  misc_feature (653)..(653): n is a, c, g, or t
  misc_feature (675)..(675): n is a, c, g, or t
  misc_feature (677)..(677): n is a, c, g, or t
  misc_feature (679)..(679): n is a, c, g, or t
  misc_feature (682)..(682): n is a, c, g, or t
  misc_feature (687)..(687): n is a, c, g, or t
  misc_feature (697)..(697): n is a, c, g, or t
  misc_feature (705)..(705): n is a, c, g, or t
  misc_feature (709)..(710): n is a, c, g, or t
  misc_feature (720)..(720): n is a, c, g, or t
  misc_feature (734)..(737): n is a, c, g, or t
  misc_feature (739)..(739): n is a, c, g, or t
  misc_feature (741)..(741): n is a, c, g, or t
  misc_feature (748)..(751): n is a, c, g, or t
  misc_feature (758)..(758): n is a, c, g, or t
  misc_feature (762)..(763): n is a, c, g, or t
  misc_feature (769)..(770): n is a, c, g, or t
  misc_feature (776)..(776): n is a, c, g, or t
  misc_feature (783)..(783): n is a, c, g, or t
  misc_feature (787)..(788): n is a, c, g, or t
  misc_feature (790)..(791): n is a, c, g, or t
  misc_feature (793)..(793): n is a, c, g, or t
  misc_feature (798)..(798): n is a, c, g, or t
  misc_feature (804)..(804): n is a, c, g, or t
  misc_feature (810)..(813): n is a, c, g, or t
  misc_feature (816)..(816): n is a, c, g, or t
  misc_feature (818)..(818): n is a, c, g, or t
  misc_feature (821)..(821): n is a, c, g, or t
  misc_feature (825)..(826): n is a, c, g, or t
  misc_feature (831)..(831): n is a, c, g, or t
  misc_feature (834)..(835): n is a, c, g, or t
  misc_feature (837)..(837): n is a, c, g, or t
  misc_feature (849)..(849): n is a, c, g, or t
  misc_feature (853)..(856): n is a, c, g, or t
  misc_feature (863)..(863): n is a, c, g, or t
  misc_feature (869)..(870): n is a, c, g, or t
  misc_feature (875)..(876): n is a, c, g, or t
  misc_feature (880)..(881): n is a, c, g, or t
  misc_feature (883)..(883): n is a, c, g, or t
  misc_feature (888)..(888): n is a, c, g, or t
  misc_feature (892)..(892): n is a, c, g, or t
  misc_feature (894)..(895): n is a, c, g, or t
  misc_feature (897)..(897): n is a, c, g, or t
  misc_feature (901)..(902): n is a, c, g, or t
  misc_feature (910)..(910): n is a, c, g, or t
  misc_feature (913)..(913): n is a, c, g, or t
  misc_feature (922)..(924): n is a, c, g, or t
  misc_feature (929)..(929): n is a, c, g, or t
  misc_feature (932)..(932): n is a, c, g, or t
  misc_feature (939)..(939): n is a, c, g, or t
  misc_feature (941)..(941): n is a, c, g, or t
  misc_feature (944)..(944): n is a, c, g, or t
  misc_feature (947)..(947): n is a, c, g, or t
  misc_feature (956)..(956): n is a, c, g, or t
  misc_feature (964)..(964): n is a, c, g, or t
  misc_feature (970)..(973): n is a, c, g, or t
  misc_feature (975)..(975): n is a, c, g, or t
  misc_feature (983)..(983): n is a, c, g, or t
  misc_feature (990)..(990): n is a, c, g, or t
  misc_feature (993)..(994): n is a, c, g, or t
  misc_feature (996)..(996): n is a, c, g, or t
  misc_feature (1000)..(1001): n is a, c, g, or t
  misc_feature (1003)..(1003): n is a, c, g, or t
  misc_feature (1007)..(1007): n is a, c, g, or t
  misc_feature (1010)..(1010): n is a, c, g, or t
  misc_feature (1012)..(1012): n is a, c, g, or t
  misc_feature (1017)..(1017): n is a, c, g, or t
  misc_feature (1021)..(1021): n is a, c, g, or t
  misc_feature (1023)..(1023): n is a, c, g, or t
  misc_feature (1025)..(1025): n is a, c, g, or t
  misc_feature (1033)..(1033): n is a, c, g, or t
  misc_feature (1036)..(1036): n is a, c, g, or t
  misc_feature (1038)..(1038): n is a, c, g, or t
  misc_feature (1040)..(1040): n is a, c, g, or t
  misc_feature (1050)..(1050): n is a, c, g, or t
  misc_feature (1053)..(1054): n is a, c, g, or t
  misc_feature (1059)..(1059): n is a, c, g, or t
  misc_feature (1062)..(1063): n is a, c, g, or t
  misc_feature (1068)..(1068): n is a, c, g, or t
  misc_feature (1079)..(1079): n is a, c, g, or t
  misc_feature (1081)..(1081): n is a, c, g, or t
  misc_feature (1083)..(1083): n is a, c, g, or t
  misc_feature (1085)..(1085): n is a, c, g, or t
  misc_feature (1089)..(1091): n is a, c, g, or t
  misc_feature (1094)..(1095): n is a, c, g, or t
  misc_feature (1099)..(1099): n is a, c, g, or t
  misc_feature (1102)..(1102): n is a, c, g, or t
  misc_feature (1107)..(1107): n is a, c, g, or t
  misc_feature (1122)..(1122): n is a, c, g, or t
  misc_feature (1131)..(1132): n is a, c, g, or t
  misc_feature (1135)..(1136): n is a, c, g, or t
  misc_feature (1141)..(1141): n is a, c, g, or t
  misc_feature (1146)..(1148): n is a, c, g, or t
  misc_feature (1151)..(1151): n is a, c, g, or t
  misc_feature (1157)..(1157): n is a, c, g, or t
  misc_feature (1165)..(1165): n is a, c, g, or t
  misc_feature (1167)..(1168): n is a, c, g, or t
  misc_feature (1171)..(1172): n is a, c, g, or t
  misc_feature (1174)..(1174): n is a, c, g, or t
  misc_feature (1181)..(1182): n is a, c, g, or t
  misc_feature (1185)..(1185): n is a, c, g, or t
  misc_feature (1189)..(1191): n is a, c, g, or t
  misc_feature (1196)..(1198): n is a, c, g, or t
  misc_feature (1200)..(1201): n is a, c, g, or t
  misc_feature (1204)..(1204): n is a, c, g, or t
  misc_feature (1210)..(1210): n is a, c, g, or t
  misc_feature (1212)..(1212): n is a, c, g, or t
  misc_feature (1225)..(1225): n is a, c, g, or t
  misc_feature (1228)..(1228): n is a, c, g, or t
  misc_feature (1231)..(1231): n is a, c, g, or t
  misc_feature (1237)..(1237): n is a, c, g, or t
  misc_feature (1243)..(1243): n is a, c, g, or t
  misc_feature (1246)..(1246): n is a, c, g, or t
  misc_feature (1253)..(1253): n is a, c, g, or t
  misc_feature (1255)..(1256): n is a, c, g, or t
  misc_feature (1259)..(1259): n is a, c, g, or t
  misc_feature (1261)..(1261): n is a, c, g, or t
  misc_feature (1264)..(1264): n is a, c, g, or t
  misc_feature (1268)..(1269): n is a, c, g, or t
  misc_feature (1271)..(1271): n is a, c, g, or t
  misc_feature (1278)..(1278): n is a, c, g, or t
  misc_feature (1282)..(1282): n is a, c, g, or t
  misc_feature (1285)..(1285): n is a, c, g, or t
  misc_feature (1295)..(1297): n is a, c, g, or t
  misc_feature (1302)..(1302): n is a, c, g, or t
  misc_feature (1309)..(1309): n is a, c, g, or t
  misc_feature (1314)..(1314): n is a, c, g, or t
  misc_feature (1316)..(1316): n is a, c, g, or t
  misc_feature (1325)..(1325): n is a, c, g, or t
  misc_feature (1329)..(1329): n is a, c, g, or t
  misc_feature (1333)..(1333): n is a, c, g, or t
  misc_feature (1337)..(1338): n is a, c, g, or t
  misc_feature (1343)..(1344): n is a, c, g, or t
  misc_feature (1352)..(1352): n is a, c, g, or t
  misc_feature (1358)..(1360): n is a, c, g, or t
  misc_feature (1363)..(1363): n is a, c, g, or t
  misc_feature (1367)..(1367): n is a, c, g, or t
  misc_feature (1376)..(1376): n is a, c, g, or t
  misc_feature (1386)..(1386): n is a, c, g, or t
  misc_feature (1388)..(1389): n is a, c, g, or t
  misc_feature (1394)..(1395): n is a, c, g, or t
  misc_feature (1397)..(1397): n is a, c, g, or t
  misc_feature (1399)..(1399): n is a, c, g, or t
  misc_feature (1403)..(1404): n is a, c, g, or t
  misc_feature (1408)..(1408): n is a, c, g, or t
  misc_feature (1410)..(1411): n is a, c, g, or t
  misc_feature (1414)..(1415): n is a, c, g, or t
  misc_feature (1418)..(1418): n is a, c, g, or t
  misc_feature (1420)..(1420): n is a, c, g, or t
  misc_feature (1437)..(1438): n is a, c, g, or t
  misc_feature (1440)..(1441): n is a, c, g, or t
  misc_feature (1446)..(1446): n is a, c, g, or t
  misc_feature (1449)..(1449): n is a, c, g, or t
  misc_feature (1453)..(1453): n is a, c, g, or t
  misc_feature (1457)..(1457): n is a, c, g, or t
  misc_feature (1464)..(1464): n is a, c, g, or t
  misc_feature (1466)..(1466): n is a, c, g, or t
  misc_feature (1481)..(1481): n is a, c, g, or t
  misc_feature (1483)..(1483): n is a, c, g, or t
  misc_feature (1500)..(1500): n is a, c, g, or t
naaatagagaaattactatgagaggatcgcatcaccatcaccatcacggtatcctatttaggtgacactaatanaatcgtcgacccacgcgctccgcacgggcggcgtggagggcggcgcggagggcgcgggcccgggagccagggagcgagcggggcgcccggcagcgcggagtcagcgccgcgggggccgcacccggctcgcgcctggacactcgcggggcgccgacctggcagggggccaaaccagtgctcctgccacctctctggctgccccctanagcctgcccatcccagcctgaccaatgtccacagccagggagcagccaatcttcancacacgggcgcacgtgttccaaattgacccagccaccaagcgaaactggatcccagcgggcaagcacgcactcactgtctcctatttctacgatgccacccgcaatgtgtaccgcatcatcannatcggaggcgncaaggccatcatcaanagcactgtcactcccaacatgaccttcaccaaaacttcccagaanttcgggaantgntgccgacantcgcgccaacacagtctanggcttgngctttgnctctgaacagcatctgacacattttgcnganaanttcnaagaanntnaaagaagnanncannntngncagggagaaatctcaagatggngngnaanctcancaagtccagnccctgggngctnncctcacaatnaggtgcccacaaannnntntntgttcannnncaacagncccnngctaannaaaaanttgtttnccgnnannanaaacnctaatncccccnnnnccntncanaatnnaaaancgnntnaaaaaaaaaatntttnnnntaaaggnctcccnntgagnncaanntnataangacnanncntaanntttttttnaantgttaaaannnatacnaancaagttnanctnggnatcctttcnaaaatgtntaaaannnncnccaaaaanacaatanaannanaacnnantatnaanantctgntttnantntaaattanctntnanttaagggaanaannccctnctnntgctnaaaattagccncncncnaacnnngtnnctangtnttttntatataaaagtatcnccactcttnnaanncttgncaacnnngtnttcagncacaaacntnnccnnantattttnnttnaatnnnagatnnngnngtncacaananatttccctgatantanttntacacnatcttnttnattattnanngcnanccncatnngntcgtaanttcntantaaaatttcnnnactantttttangaaananatatttatncaantcancatnncccannattaattnttaacnnnttnaatnaaaaaatanaaaaatattncnnctccnnantnttannttancnnatnnatntntatatatcaactcacanncnncttgnttnatanatancttatananctctagatactcctncntttctattatagagagncta

SEQ ID NO: 493 - DNA, 1484 bp, Homo Sapiens
  misc_feature (2)..(2): n is a, c, g, or t
  misc_feature (50)..(50): n is a, c, g, or t
  misc_feature (474)..(474): n is a, c, g, or t
  misc_feature (560)..(560): n is a, c, g, or t
  misc_feature (569)..(569): n is a, c, g, or t
  misc_feature (571)..(571): n is a, c, g, or t
  misc_feature (585)..(585): n is a, c, g, or t
  misc_feature (591)..(591): n is a, c, g, or t
  misc_feature (626)..(626): n is a, c, g, or t
  misc_feature (639)..(639): n is a, c, g, or t
  misc_feature (656)..(656): n is a, c, g, or t
  misc_feature (658)..(658): n is a, c, g, or t
  misc_feature (686)..(686): n is a, c, g, or t
  misc_feature (688)..(688): n is a, c, g, or t
  misc_feature (701)..(701): n is a, c, g, or t
  misc_feature (703)..(703): n is a, c, g, or t
  misc_feature (705)..(705): n is a, c, g, or t
  misc_feature (707)..(707): n is a, c, g, or t
  misc_feature (710)..(710): n is a, c, g, or t
  misc_feature (720)..(720): n is a, c, g, or t
  misc_feature (724)..(725): n is a, c, g, or t
  misc_feature (728)..(729): n is a, c, g, or t
  misc_feature (732)..(732): n is a, c, g, or t
  misc_feature (739)..(740): n is a, c, g, or t
  misc_feature (746)..(746): n is a, c, g, or t
  misc_feature (754)..(755): n is a, c, g, or t
  misc_feature (764)..(765): n is a, c, g, or t
  misc_feature (785)..(785): n is a, c, g, or t
  misc_feature (787)..(788): n is a, c, g, or t
  misc_feature (793)..(793): n is a, c, g, or t
  misc_feature (796)..(797): n is a, c, g, or t
  misc_feature (799)..(799): n is a, c, g, or t
  misc_feature (803)..(803): n is a, c, g, or t
  misc_feature (807)..(807): n is a, c, g, or t
  misc_feature (811)..(811): n is a, c, g, or t
  misc_feature (813)..(813): n is a, c, g, or t
  misc_feature (822)..(822): n is a, c, g, or t
  misc_feature (826)..(826): n is a, c, g, or t
  misc_feature (830)..(830): n is a, c, g, or t
  misc_feature (848)..(849): n is a, c, g, or t
  misc_feature (851)..(851): n is a, c, g, or t
  misc_feature (857)..(857): n is a, c, g, or t
  misc_feature (863)..(863): n is a, c, g, or t
  misc_feature (871)..(871): n is a, c, g, or t
  misc_feature (884)..(884): n is a, c, g, or t
  misc_feature (894)..(895): n is a, c, g, or t
  misc_feature (898)..(898): n is a, c, g, or t
  misc_feature (900)..(900): n is a, c, g, or t
  misc_feature (906)..(907): n is a, c, g, or t
  misc_feature (910)..(911): n is a, c, g, or t
  misc_feature (914)..(914): n is a, c, g, or t
  misc_feature (916)..(916): n is a, c, g, or t
  misc_feature (919)..(919): n is a, c, g, or t
  misc_feature (925)..(925): n is a, c, g, or t
  misc_feature (929)..(929): n is a, c, g, or t
  misc_feature (931)..(931): n is a, c, g, or t
  misc_feature (933)..(934): n is a, c, g, or t
  misc_feature (938)..(938): n is a, c, g, or t
  misc_feature (949)..(949): n is a, c, g, or t
  misc_feature (955)..(955): n is a, c, g, or t
  misc_feature (960)..(960): n is a, c, g, or t
  misc_feature (964)..(964): n is a, c, g, or t
  misc_feature (968)..(968): n is a, c, g, or t
  misc_feature (975)..(975): n is a, c, g, or t
  misc_feature (977)..(977): n is a, c, g, or t
  misc_feature (983)..(983): n is a, c, g, or t
  misc_feature (989)..(991): n is a, c, g, or t
  misc_feature (996)..(996): n is a, c, g, or t
  misc_feature (1001)..(1001): n is a, c, g, or t
  misc_feature (1003)..(1003): n is a, c, g, or t
  misc_feature (1006)..(1007): n is a, c, g, or t
  misc_feature (1010)..(1011): n is a, c, g, or t
  misc_feature (1021)..(1021): n is a, c, g, or t
  misc_feature (1032)..(1032): n is a, c, g, or t
  misc_feature (1036)..(1037): n is a, c, g, or t
  misc_feature (1043)..(1043): n is a, c, g, or t
  misc_feature (1055)..(1056): n is a, c, g, or t
  misc_feature (1065)..(1065): n is a, c, g, or t
  misc_feature (1068)..(1068): n is a, c, g, or t
  misc_feature (1071)..(1071): n is a, c, g, or t
  misc_feature (1082)..(1082): n is a, c, g, or t
  misc_feature (1087)..(1089): n is a, c, g, or t
  misc_feature (1093)..(1093): n is a, c, g, or t
  misc_feature (1096)..(1096): n is a, c, g, or t
  misc_feature (1098)..(1099): n is a, c, g, or t
  misc_feature (1109)..(1110): n is a, c, g, or t
  misc_feature (1114)..(1114): n is a, c, g, or t
  misc_feature (1119)..(1120): n is a, c, g, or t
  misc_feature (1136)..(1136): n is a, c, g, or t
  misc_feature (1143)..(1143): n is a, c, g, or t
  misc_feature (1149)..(1150): n is a, c, g, or t
  misc_feature (1152)..(1153): n is a, c, g, or t
  misc_feature (1158)..(1159): n is a, c, g, or t
  misc_feature (1161)..(1161): n is a, c, g, or t
  misc_feature (1169)..(1169): n is a, c, g, or t
  misc_feature (1188)..(1188): n is a, c, g, or t
  misc_feature (1190)..(1190): n is a, c, g, or t
  misc_feature (1200)..(1200): n is a, c, g, or t
  misc_feature (1202)..(1202): n is a, c, g, or t
  misc_feature (1211)..(1211): n is a, c, g, or t
  misc_feature (1215)..(1215): n is a, c, g, or t
  misc_feature (1217)..(1217): n is a, c, g, or t
  misc_feature (1223)..(1223): n is a, c, g, or t
  misc_feature (1230)..(1230): n is a, c, g, or t
  misc_feature (1232)..(1232): n is a, c, g, or t
  misc_feature (1234)..(1234): n is a, c, g, or t
  misc_feature (1241)..(1241): n is a, c, g, or t
  misc_feature (1243)..(1243): n is a, c, g, or t
  misc_feature (1251)..(1252): n is a, c, g, or t
  misc_feature (1255)..(1255): n is a, c, g, or t
  misc_feature (1259)..(1260): n is a, c, g, or t
  misc_feature (1263)..(1263): n is a, c, g, or t
  misc_feature (1265)..(1265): n is a, c, g, or t
  misc_feature (1270)..(1270): n is a, c, g, or t
  misc_feature (1273)..(1273): n is a, c, g, or t
  misc_feature (1282)..(1283): n is a, c, g, or t
  misc_feature (1285)..(1285): n is a, c, g, or t
  misc_feature (1289)..(1289): n is a, c, g, or t
  misc_feature (1297)..(1298): n is a, c, g, or t
  misc_feature (1306)..(1306): n is a, c, g, or t
  misc_feature (1308)..(1308): n is a, c, g, or t
  misc_feature (1313)..(1313): n is a, c, g, or t
  misc_feature (1317)..(1317): n is a, c, g, or t
  misc_feature (1320)..(1320): n is a, c, g, or t
  misc_feature (1331)..(1331): n is a, c, g, or t
  misc_feature (1333)..(1333): n is a, c, g, or t
  misc_feature (1335)..(1335): n is a, c, g, or t
  misc_feature (1355)..(1355): n is a, c, g, or t
  misc_feature (1361)..(1361): n is a, c, g, or t
  misc_feature (1365)..(1365): n is a, c, g, or t
  misc_feature (1367)..(1367): n is a, c, g, or t
  misc_feature (1369)..(1369): n is a, c, g, or t
  misc_feature (1371)..(1371): n is a, c, g, or t
  misc_feature (1382)..(1382): n is a, c, g, or t
  misc_feature (1391)..(1391): n is a, c, g, or t
  misc_feature (1399)..(1399): n is a, c, g, or t
  misc_feature (1403)..(1403): n is a, c, g, or t
  misc_feature (1406)..(1406): n is a, c, g, or t
  misc_feature (1408)..(1408): n is a, c, g, or t
  misc_feature (1415)..(1415): n is a, c, g, or t
  misc_feature (1417)..(1418): n is a, c, g, or t
  misc_feature (1423)..(1423): n is a, c, g, or t
  misc_feature (1428)..(1428): n is a, c, g, or t
  misc_feature (1433)..(1433): n is a, c, g, or t
  misc_feature (1438)..(1439): n is a, c, g, or t
  misc_feature (1442)..(1443): n is a, c, g, or t
  misc_feature (1455)..(1455): n is a, c, g, or t
  misc_feature (1461)..(1462): n is a, c, g, or t
  misc_feature (1464)..(1467): n is a, c, g, or t
  misc_feature (1470)..(1470): n is a, c, g, or t
  misc_feature (1474)..(1474): n is a, c, g, or t
  misc_feature (1476)..(1476): n is a, c, g, or t
  misc_feature (1482)..(1483): n is a, c, g, or t
antagagagattactatgagaggatcgcatcaccatcaccatcacggatnctatttaggtgacactatagaatcgtcgacccacgcgtccgcccacgcgtccgcgcggagcgcggcgctgggaggagctgctgcagcggggcgcggcgcagctggcggagctcgggccaccgggcgtggggggcgtcggggcctgcaagctcggtcccggcaagggctctcgcaagaagaggtaaggcccgtggcggtgccctgccctctgcagcgcgggtggcgcaggatctcagggcctgtccccacgtggcctccccaggagcctgccccgcgaggagagcgccggagccgcgccgggcgagggccctgagggcgtggacgggcgcgtgcgggagctgaaagacaggctggagctggagctgctgcggcagggcgaggagcagtacgagtgcgttctgaagcgcaaggagcagcacgtggncgaggtggccgggaggggcagggcgacaaccccaccagccccaccgaccccaccccccatggaccccattcgcccctctcaccganccaaccccntnaccgactcccctcnaccganccccgccccccgcactccctctgaacaacaaaggncttctcgccaaanttacttcctctccctgnancaaatcttcaaaatgaatggaatttggncntagaaaaacattncntnanaanctaaaatgcncctnnaannaanactttcnntataantacaattnncttcccttnncaaaaacttgctttctcctncnnaattnaanngnatanatcnaaananaaaacaaanttcntttnattacctgttttctcttnnancaaccnacatantaaaattnaataaaaaaactntttaaaaacnnaanantttaannttnntcnanttnatgtancaantntnntaanaaaaaaaattngtctcntttanacantaantttaaananctttgnataagnnnctaanataananttnnaannaaaaatcaantctatttttcnctgnnataaantactctttaaanntaataaaanatntanactgttataantaatnnnaaantcncnnaaaaaaattnnattnttttnntgtttatataaaacanctatttncccaannanncttcnnantttaaaanttattaaaattagtgcccntnttttttttantnaatcataanaaantncttttnaatttanantnaatcatntnaaatctcnnttnaatnnaanantattnttnttttaattnntnatantgttctannttcaccananattantctnacnttattttcttntnantttataaataataatatttnaatctncatntntntnttttaaaatantaaatatantatattantcantananataatananntcatntattnttatntttannaannatatttttaatnattatnntnnnnaantttntntattanna

SEQ ID NO: 494 - DNA, 1451 bp, Homo Sapiens
  misc_feature (1)..(2): n is a, c, g, or t
  misc_feature (4)..(4): n is a, c, g, or t
  misc_feature (196)..(196): n is a, c, g, or t
  misc_feature (759)..(759): n is a, c, g, or t
  misc_feature (761)..(761): n is a, c, g, or t
  misc_feature (764)..(764): n is a, c, g, or t
  misc_feature (770)..(770): n is a, c, g, or t
  misc_feature (800)..(800): n is a, c, g, or t
  misc_feature (808)..(808): n is a, c, g, or t
  misc_feature (822)..(822): n is a, c, g, or t
  misc_feature (828)..(828): n is a, c, g, or t
  misc_feature (831)..(831): n is a, c, g, or t
  misc_feature (836)..(836): n is a, c, g, or t
  misc_feature (846)..(846): n is a, c, g, or t
  misc_feature (864)..(864): n is a, c, g, or t
  misc_feature (877)..(877): n is a, c, g, or t
  misc_feature (881)..(881): n is a, c, g, or t
  misc_feature (891)..(891): n is a, c, g, or t
  misc_feature (893)..(893): n is a, c, g, or t
  misc_feature (895)..(895): n is a, c, g, or t
  misc_feature (901)..(901): n is a, c, g, or t
  misc_feature (906)..(906): n is a, c, g, or t
  misc_feature (910)..(911): n is a, c, g, or t
  misc_feature (913)..(913): n is a, c, g, or t
  misc_feature (921)..(921): n is a, c, g, or t
  misc_feature (932)..(932): n is a, c, g, or t
  misc_feature (935)..(935): n is a, c, g, or t
  misc_feature (937)..(937): n is a, c, g, or t
  misc_feature (942)..(942): n is a, c, g, or t
  misc_feature (951)..(953): n is a, c, g, or t
  misc_feature (959)..(959): n is a, c, g, or t
  misc_feature (962)..(963): n is a, c, g, or t
  misc_feature (970)..(970): n is a, c, g, or t
  misc_feature (975)..(975): n is a, c, g, or t
  misc_feature (984)..(986): n is a, c, g, or t
  misc_feature (990)..(991): n is a, c, g, or t
  misc_feature (1009)..(1009): n is a, c, g, or t
  misc_feature (1012)..(1012): n is a, c, g, or t
  misc_feature (1016)..(1019): n is a, c, g, or t
  misc_feature (1022)..(1022): n is a, c, g, or t
  misc_feature (1028)..(1030): n is a, c, g, or t
  misc_feature (1033)..(1033): n is a, c, g, or t
  misc_feature (1039)..(1039): n is a, c, g, or t
  misc_feature (1045)..(1045): n is a, c, g, or t
  misc_feature (1049)..(1049): n is a, c, g, or t
  misc_feature (1051)..(1051): n is a, c, g, or t
  misc_feature (1054)..(1054): n is a, c, g, or t
  misc_feature (1060)..(1060): n is a, c, g, or t
  misc_feature (1067)..(1067): n is a, c, g, or t
  misc_feature (1074)..(1074): n is a, c, g, or t
  misc_feature (1079)..(1080): n is a, c, g, or t
  misc_feature (1092)..(1094): n is a, c, g, or t
  misc_feature (1098)..(1098): n is a, c, g, or t
  misc_feature (1100)..(1100): n is a, c, g, or t
  misc_feature (1109)..(1110): n is a, c, g, or t
  misc_feature (1113)..(1113): n is a, c, g, or t
  misc_feature (1136)..(1136): n is a, c, g, or t
  misc_feature (1153)..(1153): n is a, c, g, or t
  misc_feature (1156)..(1156): n is a, c, g, or t
  misc_feature (1163)..(1163): n is a, c, g, or t
  misc_feature (1166)..(1167): n is a, c, g, or t
  misc_feature (1169)..(1172): n is a, c, g, or t
  misc_feature (1178)..(1178): n is a, c, g, or t
  misc_feature (1181)..(1181): n is a, c, g, or t
  misc_feature (1185)..(1186): n is a, c, g, or t
  misc_feature (1190)..(1191): n is a, c, g, or t
  misc_feature (1195)..(1197): n is a, c, g, or t
  misc_feature (1200)..(1201): n is a, c, g, or t
  misc_feature (1204)..(1204): n is a, c, g, or t
  misc_feature (1214)..(1214): n is a, c, g, or t
  misc_feature (1217)..(1219): n is a, c, g, or t
  misc_feature (1223)..(1223): n is a, c, g, or t
  misc_feature (1230)..(1230): n is a, c, g, or t
  misc_feature (1234)..(1234): n is a, c, g, or t
  misc_feature (1236)..(1236): n is a, c, g, or t
  misc_feature (1241)..(1242): n is a, c, g, or t
  misc_feature (1249)..(1249): n is a, c, g, or t
  misc_feature (1257)..(1259): n is a, c, g, or t
  misc_feature (1263)..(1265): n is a, c, g, or t
  misc_feature (1268)..(1268): n is a, c, g, or t
  misc_feature (1270)..(1271): n is a, c, g, or t
  misc_feature (1283)..(1283): n is a, c, g, or t
  misc_feature (1291)..(1292): n is a, c, g, or t
  misc_feature (1299)..(1300): n is a, c, g, or t
  misc_feature (1303)..(1303): n is a, c, g, or t
  misc_feature (1305)..(1311): n is a, c, g, or t
  misc_feature (1323)..(1323): n is a, c, g, or t
  misc_feature (1327)..(1327): n is a, c, g, or t
  misc_feature (1330)..(1330): n is a, c, g, or t
  misc_feature (1336)..(1337): n is a, c, g, or t
  misc_feature (1339)..(1339): n is a, c, g, or t
  misc_feature (1341)..(1341): n is a, c, g, or t
  misc_feature (1355)..(1355): n is a, c, g, or t
  misc_feature (1363)..(1364): n is a, c, g, or t
  misc_feature (1373)..(1373): n is a, c, g, or t
  misc_feature (1375)..(1375): n is a, c, g, or t
  misc_feature (1382)..(1386): n is a, c, g, or t
  misc_feature (1389)..(1389): n is a, c, g, or t
  misc_feature (1393)..(1393): n is a, c, g, or t
  misc_feature (1396)..(1396): n is a, c, g, or t
  misc_feature (1401)..(1401): n is a, c, g, or t
  misc_feature (1407)..(1407): n is a, c, g, or t
  misc_feature (1413)..(1413): n is a, c, g, or t
  misc_feature (1418)..(1418): n is a, c, g, or t
  misc_feature (1437)..(1437): n is a, c, g, or t
  misc_feature (1442)..(1443): n is a, c, g, or t
  misc_feature (1450)..(1450): n is a, c, g, or t
nnantagagaaattactatgagaggatcgcatcaccatcaccatcacgggatcctatttaggtgacactatagaatcgtcgacccacgcgtccgaagcgcagctcgaaaagcgatgccgattctggtttcctggggctgcggcccacttcggtggacccagcgctgaggcggcggcggcgaggcccaagaaataanaagcggggctggcggcggcttgctcaggagccgctggggctggaggttgaccagttcctggaagacgtgcggctacaggagcgcacgagcggtggcttgttgtcagaggccccaaatgaaaaactcttcttcgtggacactggctccaaggaaaaagggctgacaaagaagagaaccaaagtccagaagaagtcactgcttctcaagaaaccccttcgggttgacctcatcctcgagaacacatccaaagtccctgcccccaaagacgtcctcgcccaccaggtccccaacgccaagaagctcaggcggaaggagcagctatgggagaagctggccaagcagggcgagctgccccgggaggtgcgcagggcccaggcccggctcctcaacccttctgcaacaagggccaagcccgggccccaggacaccgtagagcggcccttctacgacctctggggcctcaaacaaccccctggacaggccgttggttggccagaatgagtttttcctggaagcagacccaagaataaaggattgaagcggtccagcaccgcctggcacancnaancccgtncccaggcgccccgccgttggaaggtgggcnccctgccnggaacctttcctanaattcnatnctttntgaaaaaccnccaagaaccctgcttctnaacggccccaatnaaantgtaattttncncncggccnataangagnncntaaaaacntgaaaccgggnaantngcccntgcccgctnnnaggaanaannccccccnccccnataaattcnnntttnncataaaactttttccaangcncttnnnnaangaaatnnnaantgtttnaggggnaaancngtnccaaanttcaaanggccccnaaagnnttggaaaattannnatantnttttctcannacncctcccctcctggttctcctaanaaaaaaaaaaaaactanacncctcccnccnncnnnnataaanttntttnntatnntgcnnntannaanaaaacccccnttnnngtgncctcccngttncncactnnaaaattnttttccannnttcnnngtnannaagcccaatgtncctttatnnttctgcnnaantnnnnnnncttaataagatnttcnatnatctcnnancnatattagctatacncccccaanngtgtgaagntntataaannnnnatntttnatntcttntatctnttaatntatantttaaaaatctctttatancttcnnattcatna

SEQ ID NO: 495 - DNA, 1563 bp, Homo Sapiens
  misc_feature (8)..(8): n is a, c, g, or t
  misc_feature (17)..(17): n is a, c, g, or t
  misc_feature (35)..(35): n is a, c, g, or t
  misc_feature (38)..(38): n is a, c, g, or t
  misc_feature (48)..(48): n is a, c, g, or t
  misc_feature (68)..(68): n is a, c, g, or t
  misc_feature (106)..(106): n is a, c, g, or t
  misc_feature (214)..(215): n is a, c, g, or t
  misc_feature (219)..(219): n is a, c, g, or t
  misc_feature (229)..(229): n is a, c, g, or t
  misc_feature (240)..(240): n is a, c, g, or t
  misc_feature (242)..(242): n is a, c, g, or t
  misc_feature (255)..(255): n is a, c, g, or t
  misc_feature (260)..(260): n is a, c, g, or t
  misc_feature (263)..(263): n is a, c, g, or t
  misc_feature (265)..(265): n is a, c, g, or t
  misc_feature (271)..(271): n is a, c, g, or t
  misc_feature (285)..(285): n is a, c, g, or t
  misc_feature (289)..(289): n is a, c, g, or t
  misc_feature (295)..(295): n is a, c, g, or t
  misc_feature (304)..(305): n is a, c, g, or t
  misc_feature (315)..(315): n is a, c, g, or t
  misc_feature (333)..(333): n is a, c, g, or t
  misc_feature (338)..(338): n is a, c, g, or t
  misc_feature (344)..(346): n is a, c, g, or t
  misc_feature (349)..(349): n is a, c, g, or t
  misc_feature (352)..(352): n is a, c, g, or t
  misc_feature (354)..(354): n is a, c, g, or t
  misc_feature (359)..(359): n is a, c, g, or t
  misc_feature (361)..(361): n is a, c, g, or t
  misc_feature (363)..(366): n is a, c, g, or t
  misc_feature (369)..(370): n is a, c, g, or t
  misc_feature (373)..(374): n is a, c, g, or t
  misc_feature (380)..(380): n is a, c, g, or t
  misc_feature (392)..(392): n is a, c, g, or t
  misc_feature (395)..(396): n is a, c, g, or t
  misc_feature (398)..(398): n is a, c, g, or t
  misc_feature (407)..(407): n is a, c, g, or t
  misc_feature (418)..(418): n is a, c, g, or t
  misc_feature (439)..(439): n is a, c, g, or t
  misc_feature (446)..(446): n is a, c, g, or t
  misc_feature (451)..(451): n is a, c, g, or t
  misc_feature (453)..(453): n is a, c, g, or t
  misc_feature (459)..(459): n is a, c, g, or t
  misc_feature (464)..(464): n is a, c, g, or t
  misc_feature (466)..(466): n is a, c, g, or t
  misc_feature (471)..(471): n is a, c, g, or t
  misc_feature (476)..(477): n is a, c, g, or t
  misc_feature (480)..(480): n is a, c, g, or t
  misc_feature (483)..(483): n is a, c, g, or t
  misc_feature (485)..(485): n is a, c, g, or t
  misc_feature (489)..(489): n is a, c, g, or t
  misc_feature (491)..(491): n is a, c, g, or t
  misc_feature (496)..(496): n is a, c, g, or t
  misc_feature (499)..(499): n is a, c, g, or t
  misc_feature (503)..(503): n is a, c, g, or t
  misc_feature (505)..(505): n is a, c, g, or t
  misc_feature (508)..(509): n is a, c, g, or t
  misc_feature (517)..(517): n is a, c, g, or t
  misc_feature (520)..(520): n is a, c, g, or t
  misc_feature (524)..(524): n is a, c, g, or t
  misc_feature (526)..(526): n is a, c, g, or t
  misc_feature (533)..(533): n is a, c, g, or t
  misc_feature (540)..(540): n is a, c, g, or t
  misc_feature (542)..(542): n is a, c, g, or t
  misc_feature (545)..(545): n is a, c, g, or t
  misc_feature (551)..(552): n is a, c, g, or t
  misc_feature (562)..(562): n is a, c, g, or t
  misc_feature (564)..(564): n is a, c, g, or t
  misc_feature (566)..(566): n is a, c, g, or t
  misc_feature (568)..(572): n is a, c, g, or t
  misc_feature (578)..(578): n is a, c, g, or t
  misc_feature (586)..(586): n is a, c, g, or t
  misc_feature (602)..(602): n is a, c, g, or t
  misc_feature (611)..(611): n is a, c, g, or t
  misc_feature (616)..(616): n is a, c, g, or t
  misc_feature (618)..(618): n is a, c, g, or t
  misc_feature (622)..(622): n is a, c, g, or t
  misc_feature (631)..(631): n is a, c, g, or t
  misc_feature (633)..(633): n is a, c, g, or t
  misc_feature (635)..(635): n is a, c, g, or t
  misc_feature (637)..(637): n is a, c, g, or t
  misc_feature (649)..(649): n is a, c, g, or t
  misc_feature (660)..(661): n is a, c, g, or t
  misc_feature (665)..(665): n is a, c, g, or t
  misc_feature (667)..(667): n is a, c, g, or t
  misc_feature (669)..(669): n is a, c, g, or t
  misc_feature (671)..(671): n is a, c, g, or t
  misc_feature (676)..(677): n is a, c, g, or t
  misc_feature (687)..(687): n is a, c, g, or t
  misc_feature (698)..(698): n is a, c, g, or t
  misc_feature (701)..(701): n is a, c, g, or t
  misc_feature (703)..(703): n is a, c, g, or t
  misc_feature (705)..(706): n is a, c, g, or t
  misc_feature (710)..(710): n is a, c, g, or t
  misc_feature (720)..(720): n is a, c, g, or t
  misc_feature (726)..(727): n is a, c, g, or t
  misc_feature (729)..(729): n is a, c, g, or t
  misc_feature (732)..(735): n is a, c, g, or t
  misc_feature (745)..(746): n is a, c, g, or t
  misc_feature (749)..(749): n is a, c, g, or t
  misc_feature (752)..(753): n is a, c, g, or t
  misc_feature (757)..(757): n is a, c, g, or t
  misc_feature (759)..(759): n is a, c, g, or t
  misc_feature (762)..(762): n is a, c, g, or t
  misc_feature (766)..(766): n is a, c, g, or t
  misc_feature (768)..(769): n is a, c, g, or t
  misc_feature (772)..(773): n is a, c, g, or t
  misc_feature (775)..(775): n is a, c, g, or t
  misc_feature (789)..(789): n is a, c, g, or t
  misc_feature (794)..(794): n is a, c, g, or t
  misc_feature (796)..(797): n is a, c, g, or t
  misc_feature (802)..(802): n is a, c, g, or t
  misc_feature (806)..(806): n is a, c, g, or t
  misc_feature (810)..(810): n is a, c, g, or t
  misc_feature (813)..(815): n is a, c, g, or t
  misc_feature (819)..(819): n is a, c, g, or t
  misc_feature (821)..(821): n is a, c, g, or t
  misc_feature (825)..(825): n is a, c, g, or t
  misc_feature (829)..(830): n is a, c, g, or t
  misc_feature (834)..(834): n is a, c, g, or t
  misc_feature (838)..(841): n is a, c, g, or t
  misc_feature (846)..(846): n is a, c, g, or t
  misc_feature (857)..(857): n is a, c, g, or t
  misc_feature (860)..(860): n is a, c, g, or t
  misc_feature (872)..(872): n is a, c, g, or t
  misc_feature (885)..(886): n is a, c, g, or t
  misc_feature (888)..(888): n is a, c, g, or t
  misc_feature (890)..(891): n is a, c, g, or t
  misc_feature (894)..(895): n is a, c, g, or t
  misc_feature (900)..(900): n is a, c, g, or t
  misc_feature (904)..(904): n is a, c, g, or t
  misc_feature (907)..(909): n is a, c, g, or t
  misc_feature (911)..(912): n is a, c, g, or t
  misc_feature (914)..(914): n is a, c, g, or t
  misc_feature (917)..(917): n is a, c, g, or t
  misc_feature (919)..(922): n is a, c, g, or t
  misc_feature (924)..(924): n is a, c, g, or t
  misc_feature (930)..(930): n is a, c, g, or t
  misc_feature (932)..(934): n is a, c, g, or t
  misc_feature (937)..(938): n is a, c, g, or t
  misc_feature (968)..(968): n is a, c, g, or t
  misc_feature (970)..(970): n is a, c, g, or t
  misc_feature (979)..(979): n is a, c, g, or t
  misc_feature (991)..(993): n is a, c, g, or t
  misc_feature (1003)..(1003): n is a, c, g, or t
  misc_feature (1005)..(1006): n is a, c, g, or t
  misc_feature (1009)..(1009): n is a, c, g, or t
  misc_feature (1018)..(1018): n is a, c, g, or t
  misc_feature (1025)..(1027): n is a, c, g, or t
  misc_feature (1030)..(1031): n is a, c, g, or t
  misc_feature (1033)..(1033): n is a, c, g, or t
  misc_feature (1043)..(1043): n is a, c, g, or t
  misc_feature (1045)..(1045): n is a, c, g, or t
  misc_feature (1052)..(1052): n is a, c, g, or t
  misc_feature (1059)..(1060): n is a, c, g, or t
  misc_feature (1065)..(1065): n is a, c, g, or t
  misc_feature (1068)..(1070): n is a, c, g, or t
  misc_feature (1075)..(1075): n is a, c, g, or t
  misc_feature (1077)..(1077): n is a, c, g, or t
  misc_feature (1079)..(1080): n is a, c, g, or t
  misc_feature (1083)..(1083): n is a, c, g, or t
  misc_feature (1086)..(1086): n is a, c, g, or t
  misc_feature (1088)..(1088): n is a, c, g, or t
  misc_feature (1091)..(1091): n is a, c, g, or t
  misc_feature (1093)..(1093): n is a, c, g, or t
  misc_feature (1097)..(1099): n is a, c, g, or t
  misc_feature (1105)..(1105): n is a, c, g, or t
  misc_feature (1108)..(1108): n is a, c, g, or t
  misc_feature (1111)..(1111): n is a, c, g, or t
  misc_feature (1117)..(1117): n is a, c, g, or t
  misc_feature (1123)..(1124): n is a, c, g, or t
  misc_feature (1128)..(1128): n is a, c, g, or t
  misc_feature (1130)..(1131): n is a, c, g, or t
  misc_feature (1139)..(1140): n is a, c, g, or t
  misc_feature (1144)..(1145): n is a, c, g, or t
  misc_feature (1153)..(1153): n is a, c, g, or t
  misc_feature (1156)..(1156): n is a, c, g, or t
  misc_feature (1166)..(1167): n is a, c, g, or t
  misc_feature (1172)..(1173): n is a, c, g, or t
  misc_feature (1175)..(1175): n is a, c, g, or t
  misc_feature (1180)..(1180): n is a, c, g, or t
  misc_feature (1184)..(1184): n is a, c, g, or t
  misc_feature (1186)..(1186): n is a, c, g, or t
  misc_feature (1194)..(1194): n is a, c, g, or t
  misc_feature (1197)..(1197): n is a, c, g, or t
  misc_feature (1205)..(1205): n is a, c, g, or t
  misc_feature (1210)..(1211): n is a, c, g, or t
  misc_feature (1215)..(1215): n is a, c, g, or t
  misc_feature (1220)..(1220): n is a, c, g, or t
  misc_feature (1225)..(1225): n is a, c, g, or t
  misc_feature (1228)..(1228): n is a, c, g, or t
  misc_feature (1235)..(1235): n is a, c, g, or t
  misc_feature (1238)..(1238): n is a, c, g, or t
  misc_feature (1242)..(1242): n is a, c, g, or t
  misc_feature (1245)..(1245): n is a, c, g, or t
  misc_feature (1249)..(1251): n is a, c, g, or t
  misc_feature (1254)..(1254): n is a, c, g, or t
  misc_feature (1259)..(1260): n is a, c, g, or t
  misc_feature (1270)..(1272): n is a, c, g, or t
  misc_feature (1277)..(1279): n is a, c, g, or t
  misc_feature (1284)..(1284): n is a, c, g, or t
  misc_feature (1287)..(1288): n is a, c, g, or t
  misc_feature (1293)..(1293): n is a, c, g, or t
  misc_feature (1303)..(1303): n is a, c, g, or t
  misc_feature (1307)..(1307): n is a, c, g, or t
  misc_feature (1313)..(1315): n is a, c, g, or t
  misc_feature (1317)..(1317): n is a, c, g, or t
  misc_feature (1321)..(1321): n is a, c, g, or t
  misc_feature (1323)..(1323): n is a, c, g, or t
  misc_feature (1330)..(1333): n is a, c, g, or t
  misc_feature (1337)..(1337): n is a, c, g, or t
  misc_feature (1340)..(1341): n is a, c, g, or t
  misc_feature (1343)..(1346): n is a, c, g, or t
  misc_feature (1357)..(1358): n is a, c, g, or t
  misc_feature (1360)..(1361): n is a, c, g, or t
  misc_feature (1364)..(1364): n is a, c, g, or t
  misc_feature (1367)..(1367): n is a, c, g, or t
  misc_feature (1373)..(1373): n is a, c, g, or t
  misc_feature (1378)..(1378): n is a, c, g, or t
  misc_feature (1381)..(1381): n is a, c, g, or t
  misc_feature (1389)..(1389): n is a, c, g, or t
  misc_feature (1396)..(1396): n is a, c, g, or t
  misc_feature (1398)..(1398): n is a, c, g, or t
  misc_feature (1403)..(1404): n is a, c, g, or t
  misc_feature (1410)..(1410): n is a, c, g, or t
  misc_feature (1422)..(1423): n is a, c, g, or t
  misc_feature (1430)..(1430): n is a, c, g, or t
  misc_feature (1437)..(1437): n is a, c, g, or t
  misc_feature (1439)..(1439): n is a, c, g, or t
  misc_feature (1442)..(1442): n is a, c, g, or t
  misc_feature (1450)..(1451): n is a, c, g, or t
  misc_feature (1458)..(1459): n is a, c, g, or t
  misc_feature (1465)..(1465): n is a, c, g, or t
  misc_feature (1469)..(1469): n is a, c, g, or t
  misc_feature (1472)..(1472): n is a, c, g, or t
  misc_feature (1479)..(1479): n is a, c, g, or t
  misc_feature (1482)..(1482): n is a, c, g, or t
  misc_feature (1484)..(1484): n is a, c, g, or t
  misc_feature (1486)..(1488): n is a, c, g, or t
  misc_feature (1493)..(1493): n is a, c, g, or t
  misc_feature (1496)..(1496): n is a, c, g, or t
  misc_feature (1498)..(1498): n is a, c, g, or t
  misc_feature (1502)..(1502): n is a, c, g, or t
  misc_feature (1508)..(1508): n is a, c, g, or t
  misc_feature (1517)..(1519): n is a, c, g, or t
  misc_feature (1524)..(1524): n is a, c, g, or t
  misc_feature (1527)..(1527): n is a, c, g, or t
  misc_feature (1541)..(1541): n is a, c, g, or t
  misc_feature (1549)..(1550): n is a, c, g, or t
  misc_feature (1559)..(1559): n is a, c, g, or t
  misc_feature (1561)..(1561): n is a, c, g, or t
taaatagngagaattantatgagaggttcgcttcnccntcaccatcanggatcctatttaggtgacantatagaatcgtcgacccacgcgtccgcccacgcgatcngcccacgcgtccgggagcggagcggcggcggtgcgcagctagcgggtcggccgcggagcggaggtgcagctcggcttcccccggcacccctccccctcgggcgccagnnccanccctccgccngccgggccgancncgccgtactatcncctgnggngngagccnggggcggatccaancgcntaccancagaccccnntcatggccanccagatctccaaggctcnccggngatgannngancgncnaggangnannnngcnnttnncccgcnaaggccaacggncannanaatggccangtgaaaagcantggccacttatcccccaaggntgaatgngagtntncccctntgtgnanggaanagatnnagntancngggncnactgnatnatgncntcnnagaccagncanccancntaatcanggtgttnantgnacaagnngatatgtccncncncnnnnnataccnccttatanaaataaaaaaatttcntctttcaanaatgncntttnaaattgacntngnanttgtcctttcangaacaaatatnntaangnangnttggnnaattaaattntatctgcctanttnantnntaanaaagaaatanccaatnnancannnncaaaaatctnntanctnnaaancncanaganannaanntngttaataaatgttnaaaanannttatnccanttcnttnnngagncnaaanaacnncaanaatnnnngggtntcaaaattttncantggaaaattttngaaaacaataatnncnannacnnctgtnaaantgnnnanntnatnannnncnaccttntnnnatnnagtaaaaaataatcctaaaattaaatcaancnctcaaattnacattaaaatannntaggtatatnannttnatttgattntaatttnnnaanntnttcaaatacntntttttcntccttgnnacaanatnnncaatnantnnaanttnanatntncctnnnctaccnctnttntcttanccaaanngatntnnaattttannaatnncaatactnaanaaacattttnnctttnnancactntttncnacgtgtangtnatttcttnaatcnnaatnctatnatttnccntttgtanaanatanganggannnatnctctnnttacatcttnnnctttnnnaagtntannagatnaatagttttnttancaatannnanattnanttatctnnnngacnaannannnnaatttaaattnntnncantcntatacnatctntantaatcaanattaatnanctttnnttctanatataaatcttnntctgtangtttttncnccnatcacatnnactattnnatcttntagnaancatattntgntnannntcttnctntnttancaatcnatatctctnnntatcncanatattttcttaatnaatcaatnntttctatcncnca

SEQ ID NO: 496 - DNA, 1306 bp, Homo Sapiens
  misc_feature (761)..(761): n is a, c, g, or t
  misc_feature (794)..(794): n is a, c, g, or t
  misc_feature (818)..(818): n is a, c, g, or t
  misc_feature (830)..(830): n is a, c, g, or t
  misc_feature (844)..(844): n is a, c, g, or t
  misc_feature (882)..(882): n is a, c, g, or t
  misc_feature (893)..(893): n is a, c, g, or t
  misc_feature (895)..(895): n is a, c, g, or t
  misc_feature (935)..(935): n is a, c, g, or t
  misc_feature (944)..(944): n is a, c, g, or t
  misc_feature (947)..(947): n is a, c, g, or t
  misc_feature (953)..(953): n is a, c, g, or t
  misc_feature (994)..(994): n is a, c, g, or t
  misc_feature (1009)..(1009): n is a, c, g, or t
  misc_feature (1025)..(1025): n is a, c, g, or t
  misc_feature (1029)..(1029): n is a, c, g, or t
  misc_feature (1044)..(1044): n is a, c, g, or t
  misc_feature (1048)..(1048): n is a, c, g, or t
  misc_feature (1051)..(1052): n is a, c, g, or t
  misc_feature (1065)..(1065): n is a, c, g, or t
  misc_feature (1068)..(1068): n is a, c, g, or t
  misc_feature (1078)..(1078): n is a, c, g, or t
  misc_feature (1080)..(1080): n is a, c, g, or t
  misc_feature (1084)..(1084): n is a, c, g, or t
  misc_feature (1107)..(1107): n is a, c, g, or t
  misc_feature (1112)..(1112): n is a, c, g, or t
  misc_feature (1116)..(1116): n is a, c, g, or t
  misc_feature (1121)..(1121): n is a, c, g, or t
  misc_feature (1127)..(1127): n is a, c, g, or t
  misc_feature (1129)..(1129): n is a, c, g, or t
  misc_feature (1131)..(1131): n is a, c, g, or t
  misc_feature (1146)..(1146): n is a, c, g, or t
  misc_feature (1148)..(1148): n is a, c, g, or t
  misc_feature (1150)..(1150): n is a, c, g, or t
  misc_feature (1152)..(1152): n is a, c, g, or t
  misc_feature (1187)..(1187): n is a, c, g, or t
  misc_feature (1191)..(1191): n is a, c, g, or t
  misc_feature (1203)..(1204): n is a, c, g, or t
  misc_feature (1208)..(1208): n is a, c, g, or t
  misc_feature (1212)..(1215): n is a, c, g, or t
  misc_feature (1237)..(1237): n is a, c, g, or t
  misc_feature (1242)..(1242): n is a, c, g, or t
  misc_feature (1244)..(1244): n is a, c, g, or t
  misc_feature (1250)..(1251): n is a, c, g, or t
  misc_feature (1258)..(1259): n is a, c, g, or t
  misc_feature (1264)..(1264): n is a, c, g, or t
  misc_feature (1266)..(1266): n is a, c, g, or t
  misc_feature (1271)..(1271): n is a, c, g, or t
  misc_feature (1274)..(1275): n is a, c, g, or t
  misc_feature (1280)..(1280): n is a, c, g, or t
  misc_feature (1287)..(1291): n is a, c, g, or t
  misc_feature (1294)..(1294): n is a, c, g, or t
  misc_feature (1301)..(1301): n is a, c, g, or t
  misc_feature (1303)..(1304): n is a, c, g, or t
tagagaaattactatgagaggatcgcatcaccatcaccatcacggatcctatttaggtgacactatagaatcgtcgacccacgcgtccggttcgacagtcagccgcatcttcttttgcgtcgccagccgagccacatcgctcagacaccatggggaaggtgaaggtcggagtcaacggatttggtcgtattgggcgcctggtcaccagggctgcttttaactctggtaaagtggatattgttgccatcaatgaccccttcattgacctcaactacatggtttacatgttccaatatgattccacccatggcaaattccatggcaccgtcaaggctgagaacgggaagcttgtcatcaatggaaatcccatcaccatcttccaggagcgagatccctccaaaatcaagtggggcgatgctggcgctgagtacgtcgtggagtccactggcgtcttcaccaccatggagaaggctggggctcatttgcaggggggagccaaaagggtcatcatctctgccccctctgctgatgcccccatgttcgtcatgggtgtgaaccatgagaagtatgacaacagcctcaagatcatcagcaatgcctcctgcaccaccaactgcttagcacccctggccaaggtcatccatgacaactttggtatcgtggaaggactcatgaccacagtccatgccatcactgccacccagaagactgtggatggcccctccgggaaactgtggcgtgatggccgcggggctctccanaacatcatccctgcctctactggcgctgccaangctgtgggcaaggtcatccctganctgaacgggaanctcactggcatggnccttccgtgtcccccactggcaacgtgtcagtgggggnacctgaactgncngtctaaaaaaacctgccaaaaatgatgacatcaaaaaagngggtgaaanaangcgtcngaaaggcccccctcaagggcatcctggggctaaactggaancaccagggggtctcnttttgaatttaaaaangaanccccactcctccacntttnaannctgggggctgggnatngcccctcaancnaccnctttgtcaagctcattttctggnatganaacnaattnggttancncnaaaagggggggggancncntnggccccaagggccccccaagaaaaaaaaccctggnaccncccccccccccnngaancccnnnnggaaaaaaaaaacccccccggnggggnancctggnnaattaannccccncnaaaanaannccccnccccaannnnnggnaaacccntnnaa

SEQ ID NO: 497 - DNA, 1299 bp, Homo Sapiens
  misc_feature (755)..(755): n is a, c, g, or t
  misc_feature (840)..(840): n is a, c, g, or t
  misc_feature (844)..(844): n is a, c, g, or t
  misc_feature (873)..(873): n is a, c, g, or t
  misc_feature (899)..(899): n is a, c, g, or t
  misc_feature (920)..(920): n is a, c, g, or t
  misc_feature (932)..(932): n is a, c, g, or t
  misc_feature (941)..(941): n is a, c, g, or t
  misc_feature (984)..(984): n is a, c, g, or t
  misc_feature (990)..(990): n is a, c, g, or t
  misc_feature (1008)..(1008): n is a, c, g, or t
  misc_feature (1018)..(1018): n is a, c, g, or t
  misc_feature (1028)..(1028): n is a, c, g, or t
  misc_feature (1048)..(1048): n is a, c, g, or t
  misc_feature (1063)..(1063): n is a, c, g, or t
  misc_feature (1067)..(1067): n is a, c, g, or t
  misc_feature (1074)..(1074): n is a, c, g, or t
  misc_feature (1084)..(1084): n is a, c, g, or t
  misc_feature (1090)..(1090): n is a, c, g, or t
  misc_feature (1095)..(1095): n is a, c, g, or t
  misc_feature (1100)..(1100): n is a, c, g, or t
  misc_feature (1103)..(1103): n is a, c, g, or t
  misc_feature (1130)..(1130): n is a, c, g, or t
  misc_feature (1138)..(1138): n is a, c, g, or t
  misc_feature (1168)..(1168): n is a, c, g, or t
  misc_feature (1175)..(1175): n is a, c, g, or t
  misc_feature (1201)..(1202): n is a, c, g, or t
  misc_feature (1204)..(1204): n is a, c, g, or t
  misc_feature (1206)..(1206): n is a, c, g, or t
  misc_feature (1210)..(1210): n is a, c, g, or t
  misc_feature (1217)..(1218): n is a, c, g, or t
  misc_feature (1222)..(1222): n is a, c, g, or t
  misc_feature (1225)..(1225): n is a, c, g, or t
  misc_feature (1229)..(1229): n is a, c, g, or t
  misc_feature (1239)..(1239): n is a, c, g, or t
  misc_feature (1244)..(1244): n is a, c, g, or t
  misc_feature (1251)..(1251): n is a, c, g, or t
  misc_feature (1261)..(1261): n is a, c, g, or t
  misc_feature (1268)..(1269): n is a, c, g, or t
  misc_feature (1272)..(1276): n is a, c, g, or t
  misc_feature (1289)..(1289): n is a, c, g, or t
  misc_feature (1299)..(1299): n is a, c, g, or t
attagagagattactatgagaggatcgcatcaccatcaccatcacggatcctatttaggtgacactatagaatcgtcgacccacgcgtccgggctgattcatcgccggtttgcagactgagccgcgtcgggtgtgcgccgctgctgctgttgcctctgtcttcgcgtcaccacagaggcaagacaagggtccatatcgcggcatccggctcccgcccgtcttcaggagagaaagaaaaaataaaatatacttggggaagttgtacctgccagaattagcaagagctttctttaagaagacatttgtcaaactcaacaaattgaaggttaacaccttaagagttgtagttactgaccagaaatatggacagacttcttagacttggaggaggtatgcctggactgggccaggggccacctacagatgctcctgcagtggacacagcagaacaagtctatatctcttccctggcactgttaaaaatgttaaaacatggccgtgctggagttccaatggaagttatgggtttgatgcttggagaatttgttgatgattataccgtcagagtgattgatgtgtttgctatgccacagtcaggaacaggtgtcagtgtggaggcagttgatccagtgttccaagctaaaatgttggatatgttgaagcagacaggaaggccggagatggttgttggttggtatcacagtcaccctggctttggttgttggctttctggtgtggatatcaacactcagcanagctttgaagccttgtcggaaagagctgtggcagtggttgtggatcccattcagagtgtaaaaggaaaggttgttattgatgccntcanattgatcaatgctaatatgatggtcttangacatgaaccaagacaaacaacttcnaatctgggtcacttaaaaaancccatctatccnggcattaanttcttgggactaaacagaaatttattaccccccttactattanctatcngaaaaaatgaactggaanaaaaaagttngctaaatttncctaaaaaaaattggatggnaagttttgaaccttnccgnactaccngggaacattnttaaanccaangaatnccngggtaaaaaaaatgttggaaataaccnaaaattanaaaaaggcggttaaaaaaaaaaaaaaaaanaaacccnggaaacctggcaaaaaaaaagttggnnanangaancccaccnntttngangaanatgggggggnctttnaaccccnaaatttcccnggttaannccnnnnnggaaaagcccaanttaaaaaaan

SEQ ID NO: 498 - DNA, 1414 bp, Homo Sapiens
  misc_feature (1)..(1): n is a, c, g, or t
  misc_feature (958)..(958): n is a, c, g, or t
  misc_feature (965)..(965): n is a, c, g, or t
  misc_feature (998)..(998): n is a, c, g, or t
  misc_feature (1000)..(1000): n is a, c, g, or t
  misc_feature (1036)..(1036): n is a, c, g, or t
  misc_feature (1053)..(1053): n is a, c, g, or t
  misc_feature (1063)..(1063): n is a, c, g, or t
  misc_feature (1077)..(1077): n is a, c, g, or t
  misc_feature (1109)..(1109): n is a, c, g, or t
  misc_feature (1118)..(1118): n is a, c, g, or t
  misc_feature (1131)..(1131): n is a, c, g, or t
  misc_feature (1139)..(1139): n is a, c, g, or t
  misc_feature (1146)..(1146): n is a, c, g, or t
  misc_feature (1167)..(1167): n is a, c, g, or t
  misc_feature (1169)..(1169): n is a, c, g, or t
  misc_feature (1188)..(1188): n is a, c, g, or t
  misc_feature (1194)..(1194): n is a, c, g, or t
  misc_feature (1199)..(1199): n is a, c, g, or t
  misc_feature (1204)..(1205): n is a, c, g, or t
  misc_feature (1212)..(1212): n is a, c, g, or t
  misc_feature (1226)..(1226): n is a, c, g, or t
  misc_feature (1228)..(1228): n is a, c, g, or t
  misc_feature (1231)..(1231): n is a, c, g, or t
  misc_feature (1251)..(1251): n is a, c, g, or t
  misc_feature (1258)..(1258): n is a, c, g, or t
  misc_feature (1262)..(1262): n is a, c, g, or t
  misc_feature (1268)..(1268): n is a, c, g, or t
  misc_feature (1273)..(1273): n is a, c, g, or t
  misc_feature (1275)..(1275): n is a, c, g, or t
  misc_feature (1279)..(1282): n is a, c, g, or t
  misc_feature (1294)..(1294): n is a, c, g, or t
  misc_feature (1296)..(1297): n is a, c, g, or t
  misc_feature (1306)..(1306): n is a, c, g, or t
  misc_feature (1313)..(1313): n is a, c, g, or t
  misc_feature (1324)..(1324): n is a, c, g, or t
  misc_feature (1329)..(1329): n is a, c, g, or t
  misc_feature (1335)..(1335): n is a, c, g, or t
  misc_feature (1338)..(1339): n is a, c, g, or t
  misc_feature (1342)..(1342): n is a, c, g, or t
  misc_feature (1361)..(1361): n is a, c, g, or t
  misc_feature (1369)..(1370): n is a, c, g, or t
  misc_feature (1376)..(1377): n is a, c, g, or t
  misc_feature (1381)..(1382): n is a, c, g, or t
  misc_feature (1386)..(1386): n is a, c, g, or t
  misc_feature (1391)..(1391): n is a, c, g, or t
  misc_feature (1398)..(1398): n is a, c, g, or t
  misc_feature (1401)..(1401): n is a, c, g, or t
nttagagaaaattactatgagaggatcgcatcaccatcaccatcacggatcctatttaggtgacactatagaatcgtcgacccacgcgtccgccatgatgaagatgcttttggacccaatgggaggcattgtgatgaccaatgatggcaatgccattcttcgagagattcaagtccagcatccagcggccaagtccatgatcgaaattagccggacccaggatgaagaggttggagatgggaccacatcagtaattattcttgcaggggaaatgctgtctgtagctgagcacttcctggagcagcagatgcacccaacagtggtgatcagtgcttaccgcaaggcattggatgatatgatcagcaccctaaagaaaataagtatcccagtcgacatcagtgacagtgatatgatgctgaacatcatcaacagctctattactaccaaagccatcagtcggtggtcatctttggcttgcaacattgccctggatgctgtcaagatggtacagtttgaggagaatggtcggaaagagattgacataaaaaaatatgcaagagtggaaaagatacctggaggcatcattgaagactcctgtgtcttgcgtggagtcatgattaacaaggatgtgacccatccacgtatgcggcgctatatcaagaaccctcgcattgtgctgctggattcttctctggaatacaagaaaggagaaagccagactgacattgagattacacgagaggaggacttcacccgaattctccagatggaggaagagtacatccagcagctctgtgaggacattatccaactgaagcccgatgtggtcatcactgaaaagggcatctcagatttagctcagcactaccttatgcgggccaatatcacagccatccgcaaagtccggaagacagacaataatcgcattgctagagcctgtggggcccggatagtccanccgaccnaaaggaactgaaaaaaaatgatgttggaacagnancaggcctgttggaaaatcaaaaaattgggaaagaanactttactttcctcccngactgcaaanacccaaggcctgcncattcccctccgggggctaaccaaaaaaatcncccggaaanaaacccacccccnggaagccntgcaagngggcccaatgttcccggaccncnctgggccaggggggggccnccaaanggctnggccnnccttaanaaaaaccaggcctnanggnggggaaaaggccaaggggtntgccccncccnaaggtntcccntnccgnnnnaaaagggggccncnntcttttttnctttggnaaaaccaaaanttgancggggnaannaanaccttttgaaaaaaaggcntgaccctnngtccannaaanngganccttncctttanttnccccaaaaaaacc

SEQ ID NO: 499 - DNA, 1406 bp, Homo Sapiens
  misc_feature (835)..(835): n is a, c, g, or t
  misc_feature (868)..(868): n is a, c, g, or t
  misc_feature (870)..(870): n is a, c, g, or t
  misc_feature (884)..(884): n is a, c, g, or t
  misc_feature (905)..(905): n is a, c, g, or t
  misc_feature (932)..(932): n is a, c, g, or t
  misc_feature (937)..(937): n is a, c, g, or t
  misc_feature (940)..(940): n is a, c, g, or t
  misc_feature (943)..(943): n is a, c, g, or t
  misc_feature (984)..(984): n is a, c, g, or t
  misc_feature (1005)..(1005): n is a, c, g, or t
  misc_feature (1012)..(1012): n is a, c, g, or t
  misc_feature (1014)..(1014): n is a, c, g, or t
  misc_feature (1018)..(1018): n is a, c, g, or t
  misc_feature (1031)..(1031): n is a, c, g, or t
  misc_feature (1044)..(1044): n is a, c, g, or t
  misc_feature (1058)..(1058): n is a, c, g, or t
  misc_feature (1068)..(1069): n is a, c, g, or t
  misc_feature (1074)..(1074): n is a, c, g, or t
  misc_feature (1078)..(1078): n is a, c, g, or t
  misc_feature (1080)..(1080): n is a, c, g, or t
  misc_feature (1087)..(1087): n is a, c, g, or t
  misc_feature (1090)..(1090): n is a, c, g, or t
  misc_feature (1092)..(1092): n is a, c, g, or t
  misc_feature (1094)..(1094): n is a, c, g, or t
  misc_feature (1098)..(1099): n is a, c, g, or t
  misc_feature (1114)..(1114): n is a, c, g, or t
  misc_feature (1119)..(1119): n is a, c, g, or t
  misc_feature (1122)..(1122): n is a, c, g, or t
  misc_feature (1124)..(1124): n is a, c, g, or t
  misc_feature (1134)..(1134): n is a, c, g, or t
  misc_feature (1137)..(1137): n is a, c, g, or t
  misc_feature (1145)..(1145): n is a, c, g, or t
  misc_feature (1153)..(1155): n is a, c, g, or t
  misc_feature (1159)..(1163): n is a, c, g, or t
  misc_feature (1168)..(1168): n is a, c, g, or t
  misc_feature (1170)..(1171): n is a, c, g, or t
  misc_feature (1180)..(1181): n is a, c, g, or t
  misc_feature (1183)..(1183): n is a, c, g, or t
  misc_feature (1191)..(1193): n is a, c, g, or t
  misc_feature (1196)..(1197): n is a, c, g, or t
  misc_feature (1202)..(1202): n is a, c, g, or t
  misc_feature (1207)..(1207): n is a, c, g, or t
  misc_feature (1211)..(1212): n is a, c, g, or t
  misc_feature (1218)..(1218): n is a, c, g, or t
  misc_feature (1227)..(1227): n is a, c, g, or t
  misc_feature (1229)..(1229): n is a, c, g, or t
  misc_feature (1248)..(1248): n is a, c, g, or t
  misc_feature (1253)..(1253): n is a, c, g, or t
  misc_feature (1257)..(1257): n is a, c, g, or t
  misc_feature (1264)..(1265): n is a, c, g, or t
  misc_feature (1267)..(1267): n is a, c, g, or t
  misc_feature (1274)..(1274): n is a, c, g, or t
  misc_feature (1292)..(1292): n is a, c, g, or t
  misc_feature (1295)..(1295): n is a, c, g, or t
  misc_feature (1302)..(1302): n is a, c, g, or t
  misc_feature (1309)..(1309): n is a, c, g, or t
  misc_feature (1312)..(1312): n is a, c, g, or t
  misc_feature (1317)..(1317): n is a, c, g, or t
  misc_feature (1319)..(1319): n is a, c, g, or t
  misc_feature (1326)..(1326): n is a, c, g, or t
  misc_feature (1342)..(1342): n is a, c, g, or t
  misc_feature (1348)..(1348): n is a, c, g, or t
  misc_feature (1355)..(1356): n is a, c, g, or t
  misc_feature (1361)..(1361): n is a, c, g, or t
  misc_feature (1364)..(1364): n is a, c, g, or t
  misc_feature (1368)..(1368): n is a, c, g, or t
  misc_feature (1375)..(1375): n is a, c, g, or t
  misc_feature (1380)..(1380): n is a, c, g, or t
  misc_feature (1382)..(1382): n is a, c, g, or t
  misc_feature (1384)..(1384): n is a, c, g, or t
  misc_feature (1391)..(1391): n is a, c, g, or t
  misc_feature (1395)..(1395): n is a, c, g, or t
  misc_feature (1398)..(1398): n is a, c, g, or t
  misc_feature (1400)..(1400): n is a, c, g, or t
aatagagaaattactatgagaggatcgcatcaccatcaccatcacggatcctatttaggtgacactatagaatcgtcgacccacgcgtccgcgcggagcaggtggccgcggcggggcagctgggccgccagcttggtgcctcggggaccgtctcccgctgctttggtcaccagcccctgcccgcccgacccgctccgttctccggcctgcgagccctgccggccggactttgcgccgcgtccggcgctgctgctgcgctcggggccccgctcggcgccggcggtgaccgggaagcccgcgttaaaggggcaaccgggaccctggcccggtatggctgaagtcagcatcgaccagtccaagctgcctggagtcaaggaagtatgccgagattttgctgtcctggaggaccacaccctggctcacagcctgcaggaacaagagattgagcatcatttggcatcgaacgttcagcggaaccgtttggtccagcatgatctccaggtggctaagcagctccaagaggaagatctgaaagcgcaggcccagctccagaagcgctacaaagaccttgaacaacaagactgtgaaattgctcaggaaattcaggagaagctggctattgaggcagagagacgacgcattcaggagaagaaggatgaggacatagctcgccttttgcaagaaaaggagttacaggaagagaaaaagagaaagaaacactttccagagttccctgcaacccgtgcttatgcaagatagttactattatgaagatggaggaatgaagccaagagtgatgaaagaagctgtatctactccatcacgaatggcccanagggatcaggaatggtatgatgctgaaattgcnanaaaactgcaagaanaaaaacttttggctacccagntggacatgaaaaccgcttcaagtaacntcaanatnaanaaatccctcgacttctatggctgaaaaaaaaaaagctttanaaaaaagccaaggaacggganaaatttntntttnggacaaaaaaaanaagaaccccaatngaaacccaaaaaanttaaaaccannaattncaantnaaaaaanagnantnaacnncccctttttaaaaanaaaangcnanccgggccccnccncctttttnaaaaatgnnnaaannnnnattancnnttttaaaannanaaattccnnnggnnttttnaaaanaaanncccttntaagttttntnaaaataaaaactaagaatnccctnaaangaccctnnanaaaatanggggggaaaaaaaaatcnaanatttttnccggggngtnccggntntccccanggtttaaaaaaaaatnattttnaaatttnntatanacncggnaaaaaanaattnananacccccnccanatntntaaaaa

SEQ ID NO: 500 - DNA, 1532 bp, Homo Sapiens
  misc_feature (1)..(2): n is a, c, g, or t
  misc_feature (51)..(51): n is a, c, g, or t
  misc_feature (297)..(297): n is a, c, g, or t
  misc_feature (340)..(340): n is a, c, g, or t
  misc_feature (379)..(379): n is a, c, g, or t
  misc_feature (386)..(386): n is a, c, g, or t
  misc_feature (397)..(397): n is a, c, g, or t
  misc_feature (425)..(425): n is a, c, g, or t
  misc_feature (429)..(429): n is a, c, g, or t
  misc_feature (437)..(437): n is a, c, g, or t
  misc_feature (443)..(443): n is a, c, g, or t
  misc_feature (456)..(456): n is a, c, g, or t
  misc_feature (472)..(472): n is a, c, g, or t
  misc_feature (478)..(478): n is a, c, g, or t
  misc_feature (488)..(488): n is a, c, g, or t
  misc_feature (495)..(495): n is a, c, g, or t
  misc_feature (498)..(498): n is a, c, g, or t
  misc_feature (512)..(513): n is a, c, g, or t
  misc_feature (518)..(518): n is a, c, g, or t
  misc_feature (520)..(521): n is a, c, g, or t
  misc_feature (527)..(527): n is a, c, g, or t
  misc_feature (532)..(532): n is a, c, g, or t
  misc_feature (535)..(535): n is a, c, g, or t
  misc_feature (546)..(546): n is a, c, g, or t
  misc_feature (551)..(552): n is a, c, g, or t
  misc_feature (558)..(558): n is a, c, g, or t
  misc_feature (573)..(573): n is a, c, g, or t
  misc_feature (583)..(583): n is a, c, g, or t
  misc_feature (585)..(586): n is a, c, g, or t
  misc_feature (602)..(604): n is a, c, g, or t
  misc_feature (607)..(608): n is a, c, g, or t
  misc_feature (611)..(611): n is a, c, g, or t
  misc_feature (615)..(615): n is a, c, g, or t
  misc_feature (617)..(617): n is a, c, g, or t
  misc_feature (619)..(619): n is a, c, g, or t
  misc_feature (625)..(625): n is a, c, g, or t
  misc_feature (628)..(628): n is a, c, g, or t
  misc_feature (632)..(632): n is a, c, g, or t
  misc_feature (636)..(638): n is a, c, g, or t
  misc_feature (641)..(641): n is a, c, g, or t
  misc_feature (647)..(647): n is a, c, g, or t
  misc_feature (649)..(649): n is a, c, g, or t
  misc_feature (652)..(652): n is a, c, g, or t
  misc_feature (654)..(654): n is a, c, g, or t
  misc_feature (656)..(656): n is a, c, g, or t
  misc_feature (659)..(659): n is a, c, g, or t
  misc_feature (668)..(673): n is a, c, g, or t
  misc_feature (681)..(681): n is a, c, g, or t
  misc_feature (685)..(686): n is a, c, g, or t
  misc_feature (688)..(688): n is a, c, g, or t
  misc_feature (690)..(695): n is a, c, g, or t
  misc_feature (702)..(702): n is a, c, g, or t
  misc_feature (708)..(708): n is a, c, g, or t
  misc_feature (711)..(711): n is a, c, g, or t
  misc_feature (716)..(716): n is a, c, g, or t
  misc_feature (721)..(721): n is a, c, g, or t
  misc_feature (724)..(724): n is a, c, g, or t
  misc_feature (726)..(726): n is a, c, g, or t
  misc_feature (728)..(728): n is a, c, g, or t
  misc_feature (737)..(737): n is a, c, g, or t
  misc_feature (741)..(742): n is a, c, g, or t
  misc_feature (749)..(750): n is a, c, g, or t
  misc_feature (752)..(752): n is a, c, g, or t
  misc_feature (754)..(754): n is a, c, g, or t
  misc_feature (759)..(759): n is a, c, g, or t
  misc_feature (763)..(764): n is a, c, g, or t
  misc_feature (768)..(769): n is a, c, g, or t
  misc_feature (775)..(775): n is a, c, g, or t
  misc_feature (778)..(779): n is a, c, g, or t
  misc_feature (781)..(781): n is a, c, g, or t
  misc_feature (786)..(786): n is a, c, g, or t
  misc_feature (789)..(789): n is a, c, g, or t
  misc_feature (794)..(794): n is a, c, g, or t
  misc_feature (803)..(805): n is a, c, g, or t
  misc_feature (807)..(807): n is a, c, g, or t
  misc_feature (811)..(811): n is a, c, g, or t
  misc_feature (817)..(820): n is a, c, g, or t
  misc_feature (823)..(823): n is a, c, g, or t
  misc_feature (825)..(825): n is a, c, g, or t
  misc_feature (828)..(828): n is a, c, g, or t
  misc_feature (831)..(831): n is a, c, g, or t
  misc_feature (835)..(835): n is a, c, g, or t
  misc_feature (837)..(837): n is a, c, g, or t
  misc_feature (844)..(844): n is a, c, g, or t
  misc_feature (847)..(849): n is a, c, g, or t
  misc_feature (867)..(867): n is a, c, g, or t
  misc_feature (875)..(875): n is a, c, g, or t
  misc_feature (878)..(878): n is a, c, g, or t
  misc_feature (882)..(882): n is a, c, g, or t
  misc_feature (886)..(886): n is a, c, g, or t
  misc_feature (893)..(894): n is a, c, g, or t
  misc_feature (910)..(910): n is a, c, g, or t
  misc_feature (916)..(916): n is a, c, g, or t
  misc_feature (926)..(927): n is a, c, g, or t
  misc_feature (930)..(930): n is a, c, g, or t
  misc_feature (933)..(933): n is a, c, g, or t
  misc_feature (936)..(936): n is a, c, g, or t
  misc_feature (941)..(941): n is a, c, g, or t
  misc_feature (943)..(943): n is a, c, g, or t
  misc_feature (945)..(947): n is a, c, g, or t
  misc_feature (950)..(950): n is a, c, g, or t
  misc_feature (952)..(952): n is a, c, g, or t
  misc_feature (965)..(965): n is a, c, g, or t
  misc_feature (970)..(971): n is a, c, g, or t
  misc_feature (975)..(975): n is a, c, g, or t
  misc_feature (983)..(983): n is a, c, g, or t
  misc_feature (992)..(992): n is a, c, g, or t
  misc_feature (998)..(998): n is a, c, g, or t
  misc_feature (1002)..(1002): n is a, c, g, or t
  misc_feature (1004)..(1004): n is a, c, g, or t
  misc_feature (1008)..(1008): n is a, c, g, or t
  misc_feature (1019)..(1020): n is a, c, g, or t
  misc_feature (1023)..(1023): n is a, c, g, or t
  misc_feature (1025)..(1025): n is a, c, g, or t
  misc_feature (1028)..(1032): n is a, c, g, or t
  misc_feature (1034)..(1034): n is a, c, g, or t
  misc_feature (1041)..(1041): n is a, c, g, or t
  misc_feature (1044)..(1044): n is a, c, g, or t
  misc_feature (1049)..(1049): n is a, c, g, or t
  misc_feature (1051)..(1053): n is a, c, g, or t
  misc_feature (1056)..(1056): n is a, c, g, or t
  misc_feature (1068)..(1070): n is a, c, g, or t
  misc_feature (1073)..(1073): n is a, c, g, or t
  misc_feature (1076)..(1076): n is a, c, g, or t
  misc_feature (1079)..(1079): n is a, c, g, or t
  misc_feature (1082)..(1083): n is a, c, g, or t
  misc_feature (1086)..(1090): n is a, c, g, or t
  misc_feature (1095)..(1095): n is a, c, g, or t
  misc_feature (1104)..(1107): n is a, c, g, or t
  misc_feature (1116)..(1117): n is a, c, g, or t
  misc_feature (1120)..(1120): n is a, c, g, or t
  misc_feature (1124)..(1124): n is a, c, g, or t
  misc_feature (1126)..(1126): n is a, c, g, or t
  misc_feature (1135)..(1135): n is a, c, g, or t
  misc_feature (1142)..(1142): n is a, c, g, or t
  misc_feature (1145)..(1145): n is a, c, g, or t
  misc_feature (1147)..(1147): n is a, c, g, or t
  misc_feature (1154)..(1154): n is a, c, g, or t
  misc_feature (1160)..(1161): n is a, c, g, or t
  misc_feature (1164)..(1165): n is a, c, g, or t
  misc_feature (1168)..(1168): n is a, c, g, or t
  misc_feature (1177)..(1177): n is a, c, g, or t
  misc_feature (1180)..(1182): n is a, c, g, or t
  misc_feature (1186)..(1186): n is a, c, g, or t
  misc_feature (1188)..(1189): n is a, c, g, or t
  misc_feature (1195)..(1195): n is a, c, g, or t
  misc_feature (1198)..(1198): n is a, c, g, or t
  misc_feature (1201)..(1202): n is a, c, g, or t
  misc_feature (1205)..(1205): n is a, c, g, or t
  misc_feature (1208)..(1208): n is a, c, g, or t
  misc_feature (1210)..(1212): n is a, c, g, or t
  misc_feature (1217)..(1217): n is a, c, g, or t
  misc_feature (1220)..(1220): n is a, c, g, or t
  misc_feature (1222)..(1223): n is a, c, g, or t
  misc_feature (1227)..(1228): n is a, c, g, or t
  misc_feature (1232)..(1232): n is a, c, g, or t
  misc_feature (1234)..(1234): n is a, c, g, or t
  misc_feature (1241)..(1241): n is a, c, g, or t
  misc_feature (1251)..(1251): n is a, c, g, or t
  misc_feature (1257)..(1257): n is a, c, g, or t
  misc_feature (1269)..(1269): n is a, c, g, or t
  misc_feature (1276)..(1277): n is a, c, g, or t
  misc_feature (1290)..(1290): n is a, c, g, or t
  misc_feature (1296)..(1296): n is a, c, g, or t
  misc_feature (1304)..(1305): n is a, c, g, or t
  misc_feature (1307)..(1307): n is a, c, g, or t
  misc_feature (1321)..(1321): n is a, c, g, or t
  misc_feature (1324)..(1324): n is a, c, g, or t
  misc_feature (1329)..(1329): n is a, c, g, or t
  misc_feature (1341)..(1341): n is a, c, g, or t
  misc_feature (1349)..(1349): n is a, c, g, or t
  misc_feature (1357)..(1357): n is a, c, g, or t
  misc_feature (1359)..(1360): n is a, c, g, or t
  misc_feature (1373)..(1373): n is a, c, g, or t
  misc_feature (1375)..(1375): n is a, c, g, or t
  misc_feature (1388)..(1388): n is a, c, g, or t
  misc_feature (1393)..(1393): n is a, c, g, or t
  misc_feature (1396)..(1396): n is a, c, g, or t
  misc_feature (1400)..(1400): n is a, c, g, or t
  misc_feature (1407)..(1408): n is a, c, g, or t
  misc_feature (1412)..(1412): n is a, c, g, or t
  misc_feature (1414)..(1414): n is a, c, g, or t
  misc_feature (1418)..(1418): n is a, c, g, or t
  misc_feature (1421)..(1421): n is a, c, g, or t
  misc_feature (1428)..(1431): n is a, c, g, or t
  misc_feature (1433)..(1433): n is a, c, g, or t
  misc_feature (1435)..(1437): n is a, c, g, or t
  misc_feature (1439)..(1439): n is a, c, g, or t
  misc_feature (1441)..(1441): n is a, c, g, or t
  misc_feature (1458)..(1458): n is a, c, g, or t
  misc_feature (1474)..(1474): n is a, c, g, or t
  misc_feature (1480)..(1482): n is a, c, g, or t
  misc_feature (1491)..(1492): n is a, c, g, or t
  misc_feature (1494)..(1494): n is a, c, g, or t
  misc_feature (1512)..(1512): n is a, c, g, or t
  misc_feature (1519)..(1520): n is a, c, g, or t
  misc_feature (1522)..(1522): n is a, c, g, or t
  misc_feature (1524)..(1524): n is a, c, g, or t
  misc_feature (1527)..(1527): n is a, c, g, or t
  misc_feature (1531)..(1531): n is a, c, g, or t
nntagagagattactatgagaggatcgcatcaccatcaccatcacggatcntatttaggtgacactatagaatcgtcgacccacgcgttccgcctcgctgcgacccttgaggcggtacacagcgcgcagagccgccgagcagctcgccgcgcaggccaggccgtacagcgtatcggtggggacggccaccacggcgccggcgcgcagctcggccacggcggcccgcagcgcctcggtccagccggcgcgctccgggctcgcggcctgcacggccccgctccccgggagccgcaacanccgggcgccgggggccgccggagcgggactcggcgggcggaanaggcgaccgctccgggagccagcaggcccctcgctcaancccacgntggcagccacngcggccctcatccccctgcaccgacgcnccgnagacatcngcccangcccgcttccggnaggaagtgacgctccnagccancttccggtcnaggagantcngccccgcctctgcnncgggnannttaaanggacnacnacccccaggangattnnaagganaccgggaggctgccngcgtgtaccncnntaaggctggggttggnnntcnnacnggangncncccctncanccgncccnnnaangagcgncnccnantnagnttgctgatnnnnnntggtatcnattnnanannnnnnatctccntgtaanacnatcanaatcntgntnangaaaatttntacnntattttnnantntcccngctnnctcnntatccnatnntnttttncgntaaanattttcaannnanatcntgaaannnntcncnctntancccngnttttttnccnnncaaaaaagggttttcaantatgattnctntttnattnaaatttnnttaaacccttgacttntcctcntaatcaaaanngcnttntcnttttntntnnnttncnaatattacggttngattnnaatntaaaatanatttccatnttaatnaaantnaacntatttttttannaananagnnnnnanatttatnttntaaancnnnaantttagatttctnnnacnatnatnttnnacnnnnncttcntttttattnnnnattaaaaannttnattntnctttttaantggcctnccntntaataancaaacnnttnntanctttaaatntgnnntatnanntattcntcnttnntantantnnntaatnctntnnatgnnaatnanatcgatntttcatttcntaattnatattattatangcattannatcaatacacttnttcatntaatatanntnttttatatatatantantctcncttaattgtttntttatgantatttatntnntataatctaattntnttatttaataaantatcntanttcnataattnncatnanaatntanatatatnnnncntnnncntnttattagatatgatttntatgtcttctatatanagacannnaatttatanntnatacttttataaacatantattaanntntnttnatant

SEQ ID NO: 501 - DNA, 1400 bp, Homo Sapiens
  misc_feature (878)..(878): n is a, c, g, or t
  misc_feature (887)..(887): n is a, c, g, or t
  misc_feature (910)..(910): n is a, c, g, or t
  misc_feature (920)..(920): n is a, c, g, or t
  misc_feature (922)..(922): n is a, c, g, or t
  misc_feature (943)..(943): n is a, c, g, or t
  misc_feature (946)..(946): n is a, c, g, or t
  misc_feature (980)..(980): n is a, c, g, or t
  misc_feature (982)..(982): n is a, c, g, or t
  misc_feature (986)..(986): n is a, c, g, or t
  misc_feature (993)..(993): n is a, c, g, or t
  misc_feature (1006)..(1006): n is a, c, g, or t
  misc_feature (1017)..(1017): n is a, c, g, or t
  misc_feature (1034)..(1034): n is a, c, g, or t
  misc_feature (1049)..(1049): n is a, c, g, or t
  misc_feature (1058)..(1058): n is a, c, g, or t
  misc_feature (1060)..(1060): n is a, c, g, or t
  misc_feature (1068)..(1069): n is a, c, g, or t
  misc_feature (1072)..(1073): n is a, c, g, or t
  misc_feature (1081)..(1082): n is a, c, g, or t
  misc_feature (1091)..(1091): n is a, c, g, or t
  misc_feature (1112)..(1112): n is a, c, g, or t
  misc_feature (1115)..(1115): n is a, c, g, or t
  misc_feature (1140)..(1140): n is a, c, g, or t
  misc_feature (1143)..(1143): n is a, c, g, or t
  misc_feature (1150)..(1150): n is a, c, g, or t
  misc_feature (1160)..(1160): n is a, c, g, or t
  misc_feature (1168)..(1169): n is a, c, g, or t
  misc_feature (1172)..(1172): n is a, c, g, or t
  misc_feature (1177)..(1177): n is a, c, g, or t
  misc_feature (1179)..(1179): n is a, c, g, or t
  misc_feature (1202)..(1202): n is a, c, g, or t
  misc_feature (1204)..(1204): n is a, c, g, or t
  misc_feature (1206)..(1206): n is a, c, g, or t
  misc_feature (1209)..(1209): n is a, c, g, or t
  misc_feature (1212)..(1212): n is a, c, g, or t
  misc_feature (1216)..(1216): n is a, c, g, or t
  misc_feature (1218)..(1218): n is a, c, g, or t
  misc_feature (1224)..(1224): n is a, c, g, or t
  misc_feature (1229)..(1229): n is a, c, g, or t
  misc_feature (1236)..(1236): n is a, c, g, or t
  misc_feature (1239)..(1241): n is a, c, g, or t
  misc_feature (1247)..(1248): n is a, c, g, or t
  misc_feature (1250)..(1250): n is a, c, g, or t
  misc_feature (1252)..(1253): n is a, c, g, or t
  misc_feature (1268)..(1269): n is a, c, g, or t
  misc_feature (1274)..(1274): n is a, c, g, or t
  misc_feature (1283)..(1283): n is a, c, g, or t
  misc_feature (1296)..(1296): n is a, c, g, or t
  misc_feature (1299)..(1299): n is a, c, g, or t
  misc_feature (1305)..(1308): n is a, c, g, or t
  misc_feature (1311)..(1312): n is a, c, g, or t
  misc_feature (1323)..(1326): n is a, c, g, or t
  misc_feature (1329)..(1330): n is a, c, g, or t
  misc_feature (1334)..(1334): n is a, c, g, or t
  misc_feature (1342)..(1343): n is a, c, g, or t
  misc_feature (1354)..(1354): n is a, c, g, or t
  misc_feature (1362)..(1363): n is a, c, g, or t
  misc_feature (1368)..(1374): n is a, c, g, or t
  misc_feature (1382)..(1383): n is a, c, g, or t
  misc_feature (1386)..(1387): n is a, c, g, or t
  misc_feature (1390)..(1392): n is a, c, g, or t
  misc_feature (1396)..(1396): n is a, c, g, or t
  misc_feature (1398)..(1400): n is a, c, g, or t
tagagaaattactatgagaggatcgcatcaccatcaccatcacggatcctatttaggtgacactatagaatcgtcgacccacgcgtccgggagcggcggcgggcgggccgagcagccggggcagccgcgcgtgggcatccacgggcgccgagcctccgtccgtgtctctatccctcccgggcctttgtcagcgcgcccgctgggagcggggccgagagcgccggttccagtcagacagccccgcaggtcagcggccgggccgagggcgccagagggggccatgtcgtaccagggcaagaagagcatcccgcacatcacgagtgaccgactcctcatcaaaggtggacggatcatcaacgatgaccaatccctttatgctgacgtctacctggaggatggacttatcaaacaaataggagagaacttaatcgttcctggtggagtgaagaccattgaagccaacgggcggatggttattcccggaggtattgatgtcaacacgtacctgcagaagccctcccaggggatgactgcggctgatgacttcttccaagggaccagggcggcactggtgggcgggaccacgatgatcattgaccatgttgttcctgaacctgggtccagcctactgacctctttcgagaagtggcacgaagcagctgacaccaaatcctgctgtgattactccctccacgtggacatcacaagctggtacgatggcgttcgggaggagctggaggtgctggtgcaggacaaaggcgtcaattccttccaagtctacatggcctataaggatgtctaccaaatgtccgacagccagctctatgaagcctttaccttccttaagggcctgggagctgtgatcttggtccatgcanaaaatgganatttgatagctcaggaacaaaancggatcctgnanatgggcatcacgggtcccganggncatgccctgaccaaacttgaaaaactggaggccnangcgntgttccnggccatcaccatngcgggccgaanaactgccctgtttactnccccaggtcatgaancaaaaatgnanccaaattnntcnntttggcannaaaaaaggncccctaatttttgaaaacccnttnccccacctgggaaccaatggccccnttnttggaanaaaaatgggncaaggtgnnggnttttnanttcccctccctgaaccggacctncncnccnaanattnantcccangggcnggggganttnnngtaaannangnncttttctaaaaattnncaaanggggggganaaaattttctttnccngggttnnnnaannaaaaaaaaaannnnttnnaaangggttttnnaaaaaaaaaantttttttnnccccnnnnnnntttttttnnaannggnnngggngnnn

SEQ ID NO: 502 - DNA, 1373 bp, Homo Sapiens
  misc_feature (856)..(856): n is a, c, g, or t
  misc_feature (862)..(862): n is a, c, g, or t
  misc_feature (891)..(891): n is a, c, g, or t
  misc_feature (899)..(899): n is a, c, g, or t
  misc_feature (934)..(934): n is a, c, g, or t
  misc_feature (980)..(980): n is a, c, g, or t
  misc_feature (1007)..(1007): n is a, c, g, or t
  misc_feature (1009)..(1009): n is a, c, g, or t
  misc_feature (1015)..(1015): n is a, c, g, or t
  misc_feature (1022)..(1022): n is a, c, g, or t
  misc_feature (1026)..(1026): n is a, c, g, or t
  misc_feature (1035)..(1035): n is a, c, g, or t
  misc_feature (1037)..(1037): n is a, c, g, or t
  misc_feature (1058)..(1058): n is a, c, g, or t
  misc_feature (1080)..(1080): n is a, c, g, or t
  misc_feature (1086)..(1086): n is a, c, g, or t
  misc_feature (1091)..(1091): n is a, c, g, or t
  misc_feature (1095)..(1095): n is a, c, g, or t
  misc_feature (1112)..(1112): n is a, c, g, or t
  misc_feature (1117)..(1117): n is a, c, g, or t
  misc_feature (1138)..(1139): n is a, c, g, or t
  misc_feature (1142)..(1143): n is a, c, g, or t
  misc_feature (1146)..(1146): n is a, c, g, or t
  misc_feature (1152)..(1152): n is a, c, g, or t
  misc_feature (1158)..(1158): n is a, c, g, or t
  misc_feature (1164)..(1164): n is a, c, g, or t
  misc_feature (1171)..(1172): n is a, c, g, or t
  misc_feature (1175)..(1175): n is a, c, g, or t
  misc_feature (1180)..(1181): n is a, c, g, or t
  misc_feature (1187)..(1187): n is a, c, g, or t
  misc_feature (1201)..(1201): n is a, c, g, or t
  misc_feature (1213)..(1213): n is a, c, g, or t
  misc_feature (1222)..(1222): n is a, c, g, or t
  misc_feature (1226)..(1227): n is a, c, g, or t
  misc_feature (1233)..(1233): n is a, c, g, or t
  misc_feature (1246)..(1246): n is a, c, g, or t
  misc_feature (1248)..(1248): n is a, c, g, or t
  misc_feature (1257)..(1258): n is a, c, g, or t
  misc_feature (1261)..(1261): n is a, c, g, or t
  misc_feature (1265)..(1265): n is a, c, g, or t
  misc_feature (1284)..(1284): n is a, c, g, or t
  misc_feature (1299)..(1299): n is a, c, g, or t
  misc_feature (1305)..(1305): n is a, c, g, or t
  misc_feature (1312)..(1312): n is a, c, g, or t
  misc_feature (1319)..(1319): n is a, c, g, or t
  misc_feature (1326)..(1326): n is a, c, g, or t
  misc_feature (1334)..(1334): n is a, c, g, or t
  misc_feature (1337)..(1338): n is a, c, g, or t
  misc_feature (1343)..(1343): n is a, c, g, or t
  misc_feature (1351)..(1353): n is a, c, g, or t
  misc_feature (1361)..(1361): n is a, c, g, or t
  misc_feature (1365)..(1366): n is a, c, g, or t
  misc_feature (1373)..(1373): n is a, c, g, or t
tagagaaaattactatgagaggatcgcatcaccatcaccatcacggatcctatttaggtgacactatagaatcgtcgacccacgcgtccgcaggatattactatgatccgacaacagggctctattatgaccccaactcgcaatactactataattccttgacccagcagtacctttactgggatggggaaaaagagacctacgtgccagctgcagagtctagctcccaccagcagtcgggcctgcctcctgcaaaagaggggaaagagaagaaggagaaacccaagagcaaaacagcccagcagattgccaaagacatggaacgctgggctaagagtttgaataagcagaaagaaaactttaaaaatagctttcagcctgtcaattccttgagggaagaagaaaggagagaatctgctgcagcagacgctggctttgctctctttgagaagaagggagccttagctgaaaggcagcagctcatcccagaattggtgcgaaatggagatgaggagaatcccctcaaaaggggtctggttgctgcttacagtggtgacagtgacaatgaggaggagctggtggagagacttgagagtgaggaagagaagctagctgactggaagaagatggcctgtctgctctgccggcgccagttcccgaacaaagatgccctagtcaggcaccagcaactctcagaccttcacaagcaaaacatggacatctatcgacgatccaggctgagcgagcaggagctggaagccttggagctaagggagagagagatgaaataccgagaccgagctgcagaaagacgggagaagtacggcattccagaacctccagagccaagcgcaanaagcantttgatgccggcactgtgaattacgagcnaccccccnaagatggcattgaccacagtaacattggcaacaanatgctgcaggccatggggctgggcgggaaggctctggcttgggacnaaagtgtcaaggcattacggcttcccntngaggcncaagttncggntaaagggancnggccctaggaacccaaggcanccccaaatggtttggccgggcnccaatncttanaaanattgctgttccggaaanccctnttttgcccggttccttgaaannggnntgnaaaaanaaaaanaaaaanaattccnnggnccccnnaagggnccctcccccaaatnccgtttcccccntttctttangggnngccttnggggtttaaaatntnagggaaacnnttntttngggggtttccccccccctnaaaaattccccttgnggggtncgggggnggccccnccccccnaagggtgnaanncccgnaagaaggnnnttttcccnggcnnggggggn

SEQ ID NO: 503 - DNA, 1457 bp, Homo Sapiens
  misc_feature (506)..(506): n is a, c, g, or t
  misc_feature (522)..(522): n is a, c, g, or t
  misc_feature (534)..(534): n is a, c, g, or t
  misc_feature (557)..(557): n is a, c, g, or t
  misc_feature (633)..(633): n is a, c, g, or t
  misc_feature (667)..(667): n is a, c, g, or t
  misc_feature (688)..(688): n is a, c, g, or t
  misc_feature (704)..(704): n is a, c, g, or t
  misc_feature (713)..(713): n is a, c, g, or t
  misc_feature (725)..(725): n is a, c, g, or t
  misc_feature (733)..(733): n is a, c, g, or t
  misc_feature (746)..(746): n is a, c, g, or t
  misc_feature (748)..(748): n is a, c, g, or t
  misc_feature (758)..(758): n is a, c, g, or t
  misc_feature (772)..(772): n is a, c, g, or t
  misc_feature (776)..(777): n is a, c, g, or t
  misc_feature (779)..(779): n is a, c, g, or t
  misc_feature (803)..(804): n is a, c, g, or t
  misc_feature (815)..(815): n is a, c, g, or t
  misc_feature (824)..(827): n is a, c, g, or t
  misc_feature (835)..(835): n is a, c, g, or t
  misc_feature (846)..(846): n is a, c, g, or t
  misc_feature (861)..(862): n is a, c, g, or t
  misc_feature (868)..(868): n is a, c, g, or t
  misc_feature (873)..(873): n is a, c, g, or t
  misc_feature (875)..(875): n is a, c, g, or t
  misc_feature (879)..(879): n is a, c, g, or t
  misc_feature (883)..(883): n is a, c, g, or t
  misc_feature (898)..(898): n is a, c, g, or t
  misc_feature (900)..(901): n is a, c, g, or t
  misc_feature (903)..(903): n is a, c, g, or t
  misc_feature (917)..(917): n is a, c, g, or t
  misc_feature (924)..(924): n is a, c, g, or t
  misc_feature (926)..(926): n is a, c, g, or t
  misc_feature (932)..(932): n is a, c, g, or t
  misc_feature (944)..(944): n is a, c, g, or t
  misc_feature (947)..(947): n is a, c, g, or t
  misc_feature (960)..(960): n is a, c, g, or t
  misc_feature (964)..(964): n is a, c, g, or t
  misc_feature (967)..(967): n is a, c, g, or t
  misc_feature (983)..(983): n is a, c, g, or t
  misc_feature (992)..(994): n is a, c, g, or t
  misc_feature (1013)..(1013): n is a, c, g, or t
  misc_feature (1015)..(1015): n is a, c, g, or t
  misc_feature (1022)..(1022): n is a, c, g, or t
  misc_feature (1026)..(1026): n is a, c, g, or t
  misc_feature (1034)..(1034): n is a, c, g, or t
  misc_feature (1041)..(1041): n is a, c, g, or t
  misc_feature (1044)..(1044): n is a, c, g, or t
  misc_feature (1046)..(1046): n is a, c, g, or t
  misc_feature (1054)..(1055): n is a, c, g, or t
  misc_feature (1066)..(1066): n is a, c, g, or t
  misc_feature (1074)..(1074): n is a, c, g, or t
  misc_feature (1077)..(1078): n is a, c, g, or t
  misc_feature (1082)..(1083): n is a, c, g, or t
  misc_feature (1085)..(1085): n is a, c, g, or t
  misc_feature (1090)..(1090): n is a, c, g, or t
  misc_feature (1094)..(1094): n is a, c, g, or t
  misc_feature (1101)..(1101): n is a, c, g, or t
  misc_feature (1105)..(1105): n is a, c, g, or t
  misc_feature (1108)..(1108): n is a, c, g, or t
  misc_feature (1111)..(1111): n is a, c, g, or t
  misc_feature (1114)..(1114): n is a, c, g, or t
  misc_feature (1127)..(1127): n is a, c, g, or t
  misc_feature (1129)..(1129): n is a, c, g, or t
  misc_feature (1134)..(1134): n is a, c, g, or t
  misc_feature (1139)..(1139): n is a, c, g, or t
  misc_feature (1141)..(1141): n is a, c, g, or t
  misc_feature (1148)..(1149): n is a, c, g, or t
  misc_feature (1152)..(1152): n is a, c, g, or t
  misc_feature (1155)..(1155): n is a, c, g, or t
  misc_feature (1158)..(1158): n is a, c, g, or t
  misc_feature (1163)..(1164): n is a, c, g, or t
  misc_feature (1172)..(1172): n is a, c, g, or t
  misc_feature (1177)..(1177): n is a, c, g, or t
  misc_feature (1179)..(1179): n is a, c, g, or t
  misc_feature (1190)..(1190): n is a, c, g, or t
  misc_feature (1193)..(1193): n is a, c, g, or t
  misc_feature (1221)..(1221): n is a, c, g, or t
  misc_feature (1223)..(1223): n is a, c, g, or t
  misc_feature (1225)..(1225): n is a, c, g, or t
  misc_feature (1227)..(1227): n is a, c, g, or t
  misc_feature (1237)..(1237): n is a, c, g, or t
  misc_feature (1240)..(1240): n is a, c, g, or t
  misc_feature (1243)..(1243): n is a, c, g, or t
  misc_feature (1245)..(1245): n is a, c, g, or t
  misc_feature (1248)..(1248): n is a, c, g, or t
  misc_feature (1270)..(1270): n is a, c, g, or t
  misc_feature (1272)..(1272): n is a, c, g, or t
  misc_feature (1275)..(1275): n is a, c, g, or t
  misc_feature (1287)..(1289): n is a, c, g, or t
  misc_feature (1293)..(1293): n is a, c, g, or t
  misc_feature (1297)..(1299): n is a, c, g, or t
  misc_feature (1302)..(1302): n is a, c, g, or t
  misc_feature (1310)..(1310): n is a, c, g, or t
  misc_feature (1320)..(1320): n is a, c, g, or t
  misc_feature (1322)..(1322): n is a, c, g, or t
  misc_feature (1326)..(1326): n is a, c, g, or t
  misc_feature (1332)..(1333): n is a, c, g, or t
  misc_feature (1336)..(1337): n is a, c, g, or t
  misc_feature (1358)..(1358): n is a, c, g, or t
  misc_feature (1360)..(1360): n is a, c, g, or t
  misc_feature (1363)..(1365): n is a, c, g, or t
  misc_feature (1369)..(1370): n is a, c, g, or t
  misc_feature (1378)..(1379): n is a, c, g, or t
  misc_feature (1388)..(1388): n is a, c, g, or t
  misc_feature (1390)..(1390): n is a, c, g, or t
  misc_feature (1394)..(1396): n is a, c, g, or t
  misc_feature (1398)..(1398): n is a, c, g, or t
  misc_feature (1405)..(1405): n is a, c, g, or t
  misc_feature (1410)..(1410): n is a, c, g, or t
  misc_feature (1419)..(1419): n is a, c, g, or t
  misc_feature (1425)..(1426): n is a, c, g, or t
  misc_feature (1429)..(1429): n is a, c, g, or t
  misc_feature (1436)..(1436): n is a, c, g, or t
  misc_feature (1443)..(1443): n is a, c, g, or t
  misc_feature (1447)..(1447): n is a, c, g, or t
aattagagaaattactatgagaggatcgcatcaccatcaccatcacggatcctatttaggtgacactatagaatcgtcgacccacgcgtccgccccagagtccaggccagtccccgccgtcacccggtgcgaacccgcgagaggcctagtgcagctggcagccccgccccggcacccgcctgctcttctcgcgggtccggaccgcgagcgcgggggccgacgggtcgccgctgcgccgggccgggatggcggccaccgcgctgctggaggccggcctggcgcgggtgctcttctacccgacgctgctctacaccctgttccgcgggaaggtgccgggtcgggcgcaccgggactggtaccaccgcatcgaccccaccgtgctgctgggcgcgctgccgttgcggagcttgacgcgccagctggtacaggacgagaacgtgcgcggggtgatcaccatgaacgaggagtacgagacgaggttcctgtgcaactcttcacaggagtgnaagagactaggagtcnagcagctgcggntcagcacagtagacatgactggnatccccaccttggacaacctccagaagggagtccaatttgctctcaagtaccagtcgctgggccagtgtgtttacntgcattgtaaggctgggcgctccaggagtgccantatggtggcagcatacctgantcaagtgcacaaatgnaatccaaangaggctgtaaanaacccatnaccaaaatccggntnaaaaaatccnacatcaagcctgancaanntngaatgtttcttaaaagaatttccnnaatcaaattantgcaacggnnnnaaaaaaangattggggaanttttttttcattttnnaaaaanttgantntaangggngaataaaaaaataantnnanaaacccttccctgnttttatnanaaaaanaaaaataacttnaanattgaacaatagntctnaanaccccataatttgacntatcaaaannnttccttaaaaatttataanantaaattntttnattccctnaatttanttntngatttacnntaaaaaaaacnatggtttnttnncccnnanaattncatnaaatctntcanaanttnaantaataatataaanantttgnttgcncncttcccnntantanaancatannaaaacttnaaatnancataaatctanatnaccttgttaaaaaaatacaaaaaaaatncntnanaaaatctcanctnttntnttntaaaaaaacttcctcttttcantnttntttttatttttnnnatanaaannnaantacaattntctaaatatnancatnttaaannaannatatgaaaaaaaataactctngntannnaacnnatatattnncttattgancnacannntnaattatntaaanatcattatnacaatnnaantactaanatattanaatntatataatca

SEQ ID NO: 504 - DNA, 1419 bp, Homo Sapiens
  misc_feature (3)..(3): n is a, c, g, or t
  misc_feature (762)..(762): n is a, c, g, or t
  misc_feature (796)..(796): n is a, c, g, or t
  misc_feature (799)..(799): n is a, c, g, or t
  misc_feature (808)..(808): n is a, c, g, or t
  misc_feature (928)..(928): n is a, c, g, or t
  misc_feature (933)..(933): n is a, c, g, or t
  misc_feature (935)..(935): n is a, c, g, or t
  misc_feature (951)..(951): n is a, c, g, or t
  misc_feature (953)..(953): n is a, c, g, or t
  misc_feature (961)..(961): n is a, c, g, or t
  misc_feature (973)..(973): n is a, c, g, or t
  misc_feature (978)..(978): n is a, c, g, or t
  misc_feature (985)..(985): n is a, c, g, or t
  misc_feature (991)..(991): n is a, c, g, or t
  misc_feature (997)..(997): n is a, c, g, or t
  misc_feature (1015)..(1015): n is a, c, g, or t
  misc_feature (1023)..(1023): n is a, c, g, or t
  misc_feature (1027)..(1027): n is a, c, g, or t
  misc_feature (1032)..(1032): n is a, c, g, or t
  misc_feature (1035)..(1035): n is a, c, g, or t
  misc_feature (1042)..(1043): n is a, c, g, or t
  misc_feature (1058)..(1058): n is a, c, g, or t
  misc_feature (1063)..(1063): n is a, c, g, or t
  misc_feature (1065)..(1065): n is a, c, g, or t
  misc_feature (1077)..(1078): n is a, c, g, or t
  misc_feature (1088)..(1088): n is a, c, g, or t
  misc_feature (1105)..(1107): n is a, c, g, or t
  misc_feature (1115)..(1115): n is a, c, g, or t
  misc_feature (1121)..(1122): n is a, c, g, or t
  misc_feature (1124)..(1124): n is a, c, g, or t
  misc_feature (1130)..(1131): n is a, c, g, or t
  misc_feature (1133)..(1133): n is a, c, g, or t
  misc_feature (1141)..(1141): n is a, c, g, or t
  misc_feature (1145)..(1145): n is a, c, g, or t
  misc_feature (1157)..(1158): n is a, c, g, or t
  misc_feature (1165)..(1165): n is a, c, g, or t
  misc_feature (1169)..(1169): n is a, c, g, or t
  misc_feature (1173)..(1174): n is a, c, g, or t
  misc_feature (1176)..(1176): n is a, c, g, or t
  misc_feature (1180)..(1181): n is a, c, g, or t
  misc_feature (1187)..(1187): n is a, c, g, or t
  misc_feature (1192)..(1192): n is a, c, g, or t
  misc_feature (1194)..(1195): n is a, c, g, or t
  misc_feature (1198)..(1198): n is a, c, g, or t
  misc_feature (1204)..(1204): n is a, c, g, or t
  misc_feature (1215)..(1215): n is a, c, g, or t
  misc_feature (1217)..(1217): n is a, c, g, or t
  misc_feature (1232)..(1232): n is a, c, g, or t
  misc_feature (1249)..(1249): n is a, c, g, or t
  misc_feature (1259)..(1260): n is a, c, g, or t
  misc_feature (1263)..(1264): n is a, c, g, or t
  misc_feature (1267)..(1267): n is a, c, g, or t
  misc_feature (1275)..(1276): n is a, c, g, or t
  misc_feature (1278)..(1280): n is a, c, g, or t
  misc_feature (1289)..(1289): n is a, c, g, or t
  misc_feature (1297)..(1298): n is a, c, g, or t
  misc_feature (1302)..(1302): n is a, c, g, or t
  misc_feature (1306)..(1307): n is a, c, g, or t
  misc_feature (1309)..(1310): n is a, c, g, or t
  misc_feature (1316)..(1317): n is a, c, g, or t
  misc_feature (1319)..(1319): n is a, c, g, or t
  misc_feature (1324)..(1324): n is a, c, g, or t
  misc_feature (1327)..(1327): n is a, c, g, or t
  misc_feature (1329)..(1330): n is a, c, g, or t
  misc_feature (1334)..(1334): n is a, c, g, or t
  misc_feature (1347)..(1347): n is a, c, g, or t
  misc_feature (1349)..(1349): n is a, c, g, or t
  misc_feature (1352)..(1353): n is a, c, g, or t
  misc_feature (1356)..(1358): n is a, c, g, or t
  misc_feature (1362)..(1362): n is a, c, g, or t
  misc_feature (1367)..(1369): n is a, c, g, or t
  misc_feature (1371)..(1371): n is a, c, g, or t
  misc_feature (1378)..(1378): n is a, c, g, or t
  misc_feature (1385)..(1387): n is a, c, g, or t
  misc_feature (1390)..(1390): n is a, c, g, or t
  misc_feature (1397)..(1397): n is a, c, g, or t
  misc_feature (1400)..(1400): n is a, c, g, or t
  misc_feature (1403)..(1405): n is a, c, g, or t
  misc_feature (1408)..(1409): n is a, c, g, or t
  misc_feature (1415)..(1415): n is a, c, g, or t
aantagagaaattactatgagaggatcgcatcaccatcaccatcacggatcctatttaggtgacactatagaatcgtcgacccacgcgtccgggcccggccaggcccccggcacttcctcgtcctcggcccgggtgccctgcccccgtccaggagccctaggagtgctacggggggccggagccttgcccgggccgctgccccgtccctggattcggggctggacgcagcaagcggggcgctgtgtccccaagctccccgtcctcggccaggcgggcaccacggcaggggctgagctaccctcatggaagggagaggaccgtaccggatctacgaccctgggggcagcgtgccctcaggagaggcatccgcagcttttgagcgcctagtgaaggagaattcccggctgaaggaaaaaatgcaagggataaagatgttaggggagcttttggaagagtcccagatggaagcgaccaggctccggcagaaggcagaggagctagtgaaggacaacgagctgctcccaccaccttctccctccttgggctccttcgaccccctggctgagctcacaggaaaggactcaaatgtcacagcatctcccacagcccctgcatgccccagtgacaagccagcaccagtccagaagcctccatccagtggcacctcctctgaatttgaagtggtcactcctgaggagcagaattcaccaaagagcagcagccatgccaatgcgatggcgctgggccccctgccccgtgangacggcaacctgatgctgcacctgcagcgcctgnaanaccacgctnaattgtgtgtgccgaagaaacccggaccacggccagctcttcacccacctggggccgcatggcccctgaagttcaaccgactgggaatccaaggtgcacaaaaaatgaacagcgcacctncattntncaaaacctgtgttgancnactttcgnaaggaaaacaangcttnttaaagnccaaantttgantaagggccttggaaaaanacgggatnaagnttgcnaanaggtttnnggaaaagaaaatttnggatntnaaaaattttttnnataaacaatnggaaacaaaaaagggtnnnttttgggnggccanngnttcccnnanaatggaangggnaaaggcaaaaannatttgtnttgnaaanncncccnntaatgnttacngnnagntaaagntcccaaaagtngngggcttttgggcccnccctaaaaaaaaatgtnaaattttttnnacnncancccccatnnannnttttgaaanaaaaaaannaggnaaannanntttctnntnttgantantnntttntaatataaaaatncntanntcnnnctanaaacnnncntaatttnataaatnnnatnttctttntanctnnnatnnaataanacac

SEQ ID NO: 505 - DNA, 1362 bp, Homo Sapiens
  misc_feature (433)..(433): n is a, c, g, or t
  misc_feature (481)..(481): n is a, c, g, or t
  misc_feature (510)..(510): n is a, c, g, or t
  misc_feature (519)..(519): n is a, c, g, or t
  misc_feature (523)..(523): n is a, c, g, or t
  misc_feature (532)..(532): n is a, c, g, or t
  misc_feature (534)..(534): n is a, c, g, or t
  misc_feature (539)..(540): n is a, c, g, or t
  misc_feature (545)..(545): n is a, c, g, or t
  misc_feature (548)..(548): n is a, c, g, or t
  misc_feature (551)..(551): n is a, c, g, or t
  misc_feature (558)..(558): n is a, c, g, or t
  misc_feature (566)..(566): n is a, c, g, or t
  misc_feature (570)..(571): n is a, c, g, or t
  misc_feature (574)..(575): n is a, c, g, or t
  misc_feature (577)..(577): n is a, c, g, or t
  misc_feature (579)..(579): n is a, c, g, or t
  misc_feature (581)..(581): n is a, c, g, or t
  misc_feature (584)..(586): n is a, c, g, or t
  misc_feature (590)..(594): n is a, c, g, or t
  misc_feature (596)..(596): n is a, c, g, or t
  misc_feature (598)..(602): n is a, c, g, or t
  misc_feature (607)..(610): n is a, c, g, or t
  misc_feature (612)..(612): n is a, c, g, or t
  misc_feature (614)..(616): n is a, c, g, or t
  misc_feature (618)..(619): n is a, c, g, or t
  misc_feature (621)..(623): n is a, c, g, or t
  misc_feature (625)..(626): n is a, c, g, or t
  misc_feature (628)..(634): n is a, c, g, or t
  misc_feature (636)..(641): n is a, c, g, or t
  misc_feature (644)..(646): n is a, c, g, or t
  misc_feature (648)..(649): n is a, c, g, or t
  misc_feature (651)..(653): n is a, c, g, or t
  misc_feature (656)..(662): n is a, c, g, or t
  misc_feature (665)..(674): n is a, c, g, or t
  misc_feature (676)..(689): n is a, c, g, or t
  misc_feature (691)..(692): n is a, c, g, or t
  misc_feature (694)..(709): n is a, c, g, or t
  misc_feature (711)..(715): n is a, c, g, or t
  misc_feature (717)..(718): n is a, c, g, or t
  misc_feature (720)..(745): n is a, c, g, or t
  misc_feature (747)..(759): n is a, c, g, or t
  misc_feature (761)..(773): n is a, c, g, or t
  misc_feature (775)..(775): n is a, c, g, or t
  misc_feature (777)..(779): n is a, c, g, or t
  misc_feature (781)..(783): n is a, c, g, or t
  misc_feature (785)..(790): n is a, c, g, or t
  misc_feature (793)..(798): n is a, c, g, or t
  misc_feature (800)..(803): n is a, c, g, or t
  misc_feature (807)..(809): n is a, c, g, or t
  misc_feature (811)..(814): n is a, c, g, or t
  misc_feature (816)..(821): n is a, c, g, or t
  misc_feature (823)..(827): n is a, c, g, or t
  misc_feature (829)..(829): n is a, c, g, or t
  misc_feature (831)..(836): n is a, c, g, or t
  misc_feature (838)..(844): n is a, c, g, or t
  misc_feature (847)..(847): n is a, c, g, or t
  misc_feature (850)..(854): n is a, c, g, or t
  misc_feature (856)..(866): n is a, c, g, or t
  misc_feature (868)..(869): n is a, c, g, or t
  misc_feature (871)..(872): n is a, c, g, or t
  misc_feature (874)..(874): n is a, c, g, or t
  misc_feature (876)..(879): n is a, c, g, or t
  misc_feature (881)..(882): n is a, c, g, or t
  misc_feature (885)..(885): n is a, c, g, or t
  misc_feature (887)..(887): n is a, c, g, or t
  misc_feature (889)..(896): n is a, c, g, or t
  misc_feature (898)..(899): n is a, c, g, or t
  misc_feature (901)..(901): n is a, c, g, or t
  misc_feature (903)..(907): n is a, c, g, or t
  misc_feature (910)..(913): n is a, c, g, or t
  misc_feature (916)..(918): n is a, c, g, or t
  misc_feature (920)..(922): n is a, c, g, or t
  misc_feature (924)..(928): n is a, c, g, or t
  misc_feature (930)..(930): n is a, c, g, or t
  misc_feature (932)..(933): n is a, c, g, or t
  misc_feature (935)..(944): n is a, c, g, or t
  misc_feature (946)..(948): n is a, c, g, or t
  misc_feature (951)..(958): n is a, c, g, or t
  misc_feature (961)..(961): n is a, c, g, or t
  misc_feature (963)..(968): n is a, c, g, or t
  misc_feature (971)..(979): n is a, c, g, or t
  misc_feature (981)..(983): n is a, c, g, or t
  misc_feature (985)..(986): n is a, c, g, or t
  misc_feature (990)..(991): n is a, c, g, or t
  misc_feature (993)..(993): n is a, c, g, or t
  misc_feature (995)..(998): n is a, c, g, or t
  misc_feature (1000)..(1008): n is a, c, g, or t
  misc_feature (1010)..(1016): n is a, c, g, or t
  misc_feature (1018)..(1018): n is a, c, g, or t
  misc_feature (1020)..(1023): n is a, c, g, or t
  misc_feature (1025)..(1025): n is a, c, g, or t
  misc_feature (1027)..(1027): n is a, c, g, or t
  misc_feature (1029)..(1030): n is a, c, g, or t
  misc_feature (1032)..(1032): n is a, c, g, or t
  misc_feature (1034)..(1035): n is a, c, g, or t
  misc_feature (1037)..(1040): n is a, c, g, or t
  misc_feature (1042)..(1044): n is a, c, g, or t
  misc_feature (1046)..(1057): n is a, c, g, or t
  misc_feature (1060)..(1060): n is a, c, g, or t
  misc_feature (1062)..(1065): n is a, c, g, or t
  misc_feature (1068)..(1070): n is a, c, g, or t
  misc_feature (1072)..(1074): n is a, c, g, or t
  misc_feature (1076)..(1084): n is a, c, g, or t
  misc_feature (1086)..(1094): n is a, c, g, or t
  misc_feature (1096)..(1099): n is a, c, g, or t
  misc_feature (1101)..(1104): n is a, c, g, or t
  misc_feature (1106)..(1111): n is a, c, g, or t
  misc_feature (1113)..(1128): n is a, c, g, or t
  misc_feature (1130)..(1130): n is a, c, g, or t
  misc_feature (1134)..(1134): n is a, c, g, or t
  misc_feature (1138)..(1138): n is a, c, g, or t
  misc_feature (1141)..(1147): n is a, c, g, or t
  misc_feature (1149)..(1149): n is a, c, g, or t
  misc_feature (1151)..(1151): n is a, c, g, or t
  misc_feature (1153)..(1154): n is a, c, g, or t
  misc_feature (1156)..(1158): n is a, c, g, or t
  misc_feature (1160)..(1167): n is a, c, g, or t
  misc_feature (1169)..(1179): n is a, c, g, or t
  misc_feature (1181)..(1185): n is a, c, g, or t
  misc_feature (1187)..(1194): n is a, c, g, or t
  misc_feature (1196)..(1200): n is a, c, g, or t
  misc_feature (1202)..(1204): n is a, c, g, or t
  misc_feature (1206)..(1207): n is a, c, g, or t
  misc_feature (1209)..(1216): n is a, c, g, or t
  misc_feature (1218)..(1221): n is a, c, g, or t
  misc_feature (1223)..(1225): n is a, c, g, or t
  misc_feature (1227)..(1228): n is a, c, g, or t
  misc_feature (1230)..(1236): n is a, c, g, or t
  misc_feature (1238)..(1240): n is a, c, g, or t
  misc_feature (1242)..(1247): n is a, c, g, or t
  misc_feature (1249)..(1257): n is a, c, g, or t
  misc_feature (1259)..(1263): n is a, c, g, or t
  misc_feature (1265)..(1265): n is a, c, g, or t
  misc_feature (1267)..(1268): n is a, c, g, or t
  misc_feature (1270)..(1272): n is a, c, g, or t
  misc_feature (1274)..(1279): n is a, c, g, or t
  misc_feature (1281)..(1285): n is a, c, g, or t
  misc_feature (1287)..(1289): n is a, c, g, or t
  misc_feature (1291)..(1294): n is a, c, g, or t
  misc_feature (1297)..(1301): n is a, c, g, or t
  misc_feature (1303)..(1305): n is a, c, g, or t
  misc_feature (1308)..(1312): n is a, c, g, or t
  misc_feature (1314)..(1314): n is a, c, g, or t
  misc_feature (1317)..(1319): n is a, c, g, or t
  misc_feature (1321)..(1322): n is a, c, g, or t
  misc_feature (1324)..(1324): n is a, c, g, or t
  misc_feature (1326)..(1327): n is a, c, g, or t
  misc_feature (1329)..(1329): n is a, c, g, or t
  misc_feature (1331)..(1331): n is a, c, g, or t
  misc_feature (1334)..(1341): n is a, c, g, or t
  misc_feature (1343)..(1350): n is a, c, g, or t
  misc_feature (1354)..(1356): n is a, c, g, or t
  misc_feature (1358)..(1362): n is a, c, g, or t
tagagaaattactatgagaggatcgcatcaccatcaccatcacggatcctatttaggtgacactatagaatcgtcgacccacgcgtccgggggagctccaggggacccaggcgccgtcgcttcggcggagcctgggctgaccagccaggacagcggggtaaacccgaacaattctgcgcgaggtagggaggccatggcgtccggcagtaactggctctccggggtgaatgtcgtgctggtgatggcctacgggagcctggacttgaaagaggagattgatattcgactctccagggttcaggatatcaagtatgagccccagctccttgcagatgatgatgctagactactacaactggaaacccagggaaatcaaagttgctacaactatctgtataggatgaaagctctggatgccattcgtacctctganatcccatttcattctgaaggccggcatccccgttccttaatgggcaanaatttccgctcctacctgctggatctgcnaaacactantacncctttcaangntgtanncaaancantcnttgatanccttttgnatgnntannanananccnnnctannnnnanannnnnatttnnnnanannnannannnanncnnnnnnnannnnnnaannnanntnnnaannnnnnntannnnnnnnnntnnnnnnnnnnnnnnanntnnnnnnnnnnnnnnnnannnnnannannnnnnnnnnnnnnnnnnnnnnnnnncnnnnnnnnnnnnnannnnnnnnnnnnnanannnannnannnnnnaannnnnnannnnaatnnnannnntnnnnnnannnnnanannnnnntnnnnnnnaanaannnnnannnnnnnnnnnannannanannnnannaananannnnnnnnannanannnnnaannnnaannnannnannnnnantnnannnnnnnnnnannnaannnnnnnnaanannnnnnaannnnnnnnnannncnnatannanannnnannnnnnnnnannnnnnnanannnnantnannanannannnnannnannnnnnnnnnnnatnannnnaannnannnannnnnnnnntnnnnnnnnnannnntnnnntnnnnnnannnnnnnnnnnnnnnntnaaanatanaannnnnnnantnannannnannnnnnnnannnnnnnnnnntnnnnnannnnnnnnannnnntnnnannannnnnnnnannnntnnnannannnnnnnannnannnnnnannnnnnnnntnnnnntnannannnannnnnnannnnnannnannnnatnnnnntnnnttnnnnnanatnnnannananntnantannnnnnnnannnnnnnnattnnntnnnnn

SEQ ID NO: 506 - DNA, 1417 bp, Homo Sapiens
  misc_feature (627)..(627): n is a, c, g, or t
  misc_feature (670)..(670): n is a, c, g, or t
  misc_feature (683)..(683): n is a, c, g, or t
  misc_feature (710)..(710): n is a, c, g, or t
  misc_feature (726)..(727): n is a, c, g, or t
  misc_feature (738)..(738): n is a, c, g, or t
  misc_feature (741)..(741): n is a, c, g, or t
  misc_feature (759)..(759): n is a, c, g, or t
  misc_feature (783)..(783): n is a, c, g, or t
  misc_feature (789)..(789): n is a, c, g, or t
  misc_feature (795)..(795): n is a, c, g, or t
  misc_feature (819)..(819): n is a, c, g, or t
  misc_feature (829)..(829): n is a, c, g, or t
  misc_feature (832)..(832): n is a, c, g, or t
  misc_feature (850)..(850): n is a, c, g, or t
  misc_feature (869)..(869): n is a, c, g, or t
  misc_feature (873)..(873): n is a, c, g, or t
  misc_feature (889)..(889): n is a, c, g, or t
  misc_feature (891)..(891): n is a, c, g, or t
  misc_feature (900)..(900): n is a, c, g, or t
  misc_feature (910)..(911): n is a, c, g, or t
  misc_feature (913)..(913): n is a, c, g, or t
  misc_feature (917)..(917): n is a, c, g, or t
  misc_feature (920)..(920): n is a, c, g, or t
  misc_feature (924)..(925): n is a, c, g, or t
  misc_feature (941)..(941): n is a, c, g, or t
  misc_feature (946)..(947): n is a, c, g, or t
  misc_feature (975)..(975): n is a, c, g, or t
  misc_feature (985)..(985): n is a, c, g, or t
  misc_feature (988)..(988): n is a, c, g, or t
  misc_feature (992)..(992): n is a, c, g, or t
  misc_feature (994)..(994): n is a, c, g, or t
  misc_feature (1002)..(1005): n is a, c, g, or t
  misc_feature (1008)..(1008): n is a, c, g, or t
  misc_feature (1011)..(1011): n is a, c, g, or t
  misc_feature (1019)..(1019): n is a, c, g, or t
  misc_feature (1021)..(1022): n is a, c, g, or t
  misc_feature (1024)..(1024): n is a, c, g, or t
  misc_feature (1027)..(1027): n is a, c, g, or t
  misc_feature (1031)..(1031): n is a, c, g, or t
  misc_feature (1034)..(1035): n is a, c, g, or t
  misc_feature (1042)..(1042): n is a, c, g, or t
  misc_feature (1047)..(1047): n is a, c, g, or t
  misc_feature (1050)..(1050): n is a, c, g, or t
  misc_feature (1055)..(1056): n is a, c, g, or t
  misc_feature (1059)..(1059): n is a, c, g, or t
  misc_feature (1061)..(1061): n is a, c, g, or t
  misc_feature (1072)..(1073): n is a, c, g, or t
  misc_feature (1078)..(1078): n is a, c, g, or t
  misc_feature (1099)..(1103): n is a, c, g, or t
  misc_feature (1106)..(1106): n is a, c, g, or t
  misc_feature (1108)..(1108): n is a, c, g, or t
  misc_feature (1113)..(1114): n is a, c, g, or t
  misc_feature (1128)..(1128): n is a, c, g, or t
  misc_feature (1145)..(1145): n is a, c, g, or t
  misc_feature (1147)..(1147): n is a, c, g, or t
  misc_feature (1154)..(1154): n is a, c, g, or t
  misc_feature (1157)..(1158): n is a, c, g, or t
  misc_feature (1165)..(1165): n is a, c, g, or t
  misc_feature (1168)..(1169): n is a, c, g, or t
  misc_feature (1172)..(1173): n is a, c, g, or t
  misc_feature (1176)..(1176): n is a, c, g, or t
  misc_feature (1178)..(1179): n is a, c, g, or t
  misc_feature (1181)..(1181): n is a, c, g, or t
  misc_feature (1185)..(1186): n is a, c, g, or t
  misc_feature (1189)..(1189): n is a, c, g, or t
  misc_feature (1199)..(1200): n is a, c, g, or t
  misc_feature (1203)..(1204): n is a, c, g, or t
  misc_feature (1208)..(1208): n is a, c, g, or t
  misc_feature (1210)..(1210): n is a, c, g, or t
  misc_feature (1212)..(1212): n is a, c, g, or t
  misc_feature (1214)..(1214): n is a, c, g, or t
  misc_feature (1219)..(1219): n is a, c, g, or t
  misc_feature (1227)..(1229): n is a, c, g, or t
  misc_feature (1232)..(1233): n is a, c, g, or t
  misc_feature (1237)..(1240): n is a, c, g, or t
  misc_feature (1242)..(1244): n is a, c, g, or t
  misc_feature (1257)..(1257): n is a, c, g, or t
  misc_feature (1261)..(1262): n is a, c, g, or t
  misc_feature (1264)..(1264): n is a, c, g, or t
  misc_feature (1267)..(1273): n is a, c, g, or t
  misc_feature (1275)..(1276): n is a, c, g, or t
  misc_feature (1278)..(1282): n is a, c, g, or t
  misc_feature (1284)..(1285): n is a, c, g, or t
  misc_feature (1287)..(1288): n is a, c, g, or t
  misc_feature (1293)..(1294): n is a, c, g, or t
  misc_feature (1298)..(1306): n is a, c, g, or t
  misc_feature (1310)..(1310): n is a, c, g, or t
  misc_feature (1316)..(1318): n is a, c, g, or t
  misc_feature (1320)..(1320): n is a, c, g, or t
  misc_feature (1326)..(1326): n is a, c, g, or t
  misc_feature (1328)..(1328): n is a, c, g, or t
  misc_feature (1330)..(1331): n is a, c, g, or t
  misc_feature (1333)..(1335): n is a, c, g, or t
  misc_feature (1339)..(1339): n is a, c, g, or t
  misc_feature (1343)..(1350): n is a, c, g, or t
  misc_feature (1354)..(1354): n is a, c, g, or t
  misc_feature (1356)..(1361): n is a, c, g, or t
  misc_feature (1363)..(1363): n is a, c, g, or t
  misc_feature (1366)..(1366): n is a, c, g, or t
  misc_feature (1368)..(1368): n is a, c, g, or t
  misc_feature (1372)..(1372): n is a, c, g, or t
  misc_feature (1377)..(1379): n is a, c, g, or t
  misc_feature (1382)..(1382): n is a, c, g, or t
  misc_feature (1384)..(1385): n is a, c, g, or t
  misc_feature (1390)..(1394): n is a, c, g, or t
  misc_feature (1396)..(1396): n is a, c, g, or t
  misc_feature (1398)..(1398): n is a, c, g, or t
  misc_feature (1400)..(1400): n is a, c, g, or t
  misc_feature (1402)..(1408): n is a, c, g, or t
  misc_feature (1410)..(1410): n is a, c, g, or t
  misc_feature (1416)..(1416): n is a, c, g, or t
gaatagagaaattactatgagaggatcgcatcaccatcaccatcacgggatcctatttaggtgacactatagaatcgtcgacccacgcgtccgcccacgcgtccgccatgccagatgaccttctgaccacgttggatgacacttgtgatctctttgcccccctagtccaggagactaataagcagcccccccagacggtgaacccaattggccatctcccagaaagtttaacaaaacccgaccaggttgcccccttcaccttcttacaacctcttcccctttccccaggggtcctgtcctccactccagatcattcctttagtttagagctgggcagtgaagtggatatcactgaaggagataggaagccagactacactgcttacgttgccatgatccctcagtgcataaaggaggaagacaccccttcagataatgatagtggcatctgtatgagcccagagtcctatctggggtctcctcagcacagcccctctaccaggggctctccaaataggagcctcccatctccaggtgttctctgtgggtctgcccgtcccaaaccttacgatcctcctggagagaagatggtagcagcaaaagtaaagggtgagaaactggataaanaagctgaaaaaaaatggagcaaaaacaagacagcagccactangtaccgccagaanaaaaagggcggaacaagaaggctcttnactgggtgagtgcaannagctggaaaanaanaacgaggctctaaaaaanagggcggattccctggccaagganatccantacctngaaaaaattttgaaaaaaaaaggnccccaagggnaanggggggaaaaaaaggggncccccaaatttaaggaaantcanggaacggtcaaatggngntttgtaaanaaaaaagggnntngaanttngtgnntttccaaaaaaattanttttnnaagggaaaaaaaaaaaaaaaaaaaaaangggggggcgnccncccnanagggaggnnnnatnaancttaattnanngnaancttnggnnccccggntgaanaantcccnnaangnccccccaaaanncccanctgggatttttttaaaaaaannnnngtngnccccnnggggtttttttttnggggaaaaaaccaaacnantttgggngannttttttnggnnttnnggnanntnaaannggnaaaaaaaaannccnngggnantncncccgnttgaaaannnccnngggnnnntnnnaaaaaaaattttngggnntnttnnnnnnntnncnnnnngnncnnaaaannaaannnnnnnnngggnatattnnncntttttnanannannnaaanaaannnnnnnntttntnnnnnntnttntntatnttttnnnccngnnaaaannnnncnanantnnnnnnnanaaaaang

SEQ ID NO: 507 - DNA, 1361 bp, Homo Sapiens
  misc_feature (2)..(2): n is a, c, g, or t
  misc_feature (672)..(672): n is a, c, g, or t
  misc_feature (677)..(677): n is a, c, g, or t
  misc_feature (704)..(704): n is a, c, g, or t
  misc_feature (708)..(708): n is a, c, g, or t
  misc_feature (716)..(716): n is a, c, g, or t
  misc_feature (727)..(727): n is a, c, g, or t
  misc_feature (741)..(741): n is a, c, g, or t
  misc_feature (743)..(744): n is a, c, g, or t
  misc_feature (752)..(752): n is a, c, g, or t
  misc_feature (760)..(760): n is a, c, g, or t
  misc_feature (765)..(765): n is a, c, g, or t
  misc_feature (778)..(778): n is a, c, g, or t
  misc_feature (791)..(791): n is a, c, g, or t
  misc_feature (794)..(794): n is a, c, g, or t
  misc_feature (800)..(800): n is a, c, g, or t
  misc_feature (802)..(802): n is a, c, g, or t
  misc_feature (804)..(804): n is a, c, g, or t
  misc_feature (811)..(812): n is a, c, g, or t
  misc_feature (818)..(818): n is a, c, g, or t
  misc_feature (820)..(820): n is a, c, g, or t
  misc_feature (822)..(823): n is a, c, g, or t
  misc_feature (827)..(828): n is a, c, g, or t
  misc_feature (831)..(832): n is a, c, g, or t
  misc_feature (841)..(841): n is a, c, g, or t
  misc_feature (847)..(847): n is a, c, g, or t
  misc_feature (858)..(858): n is a, c, g, or t
  misc_feature (861)..(862): n is a, c, g, or t
  misc_feature (866)..(866): n is a, c, g, or t
  misc_feature (868)..(868): n is a, c, g, or t
  misc_feature (875)..(875): n is a, c, g, or t
  misc_feature (878)..(878): n is a, c, g, or t
  misc_feature (882)..(882): n is a, c, g, or t
  misc_feature (884)..(884): n is a, c, g, or t
  misc_feature (888)..(889): n is a, c, g, or t
  misc_feature (891)..(891): n is a, c, g, or t
  misc_feature (895)..(897): n is a, c, g, or t
  misc_feature (900)..(900): n is a, c, g, or t
  misc_feature (903)..(906): n is a, c, g, or t
  misc_feature (910)..(911): n is a, c, g, or t
  misc_feature (916)..(916): n is a, c, g, or t
  misc_feature (919)..(920): n is a, c, g, or t
  misc_feature (923)..(927): n is a, c, g, or t
  misc_feature (934)..(935): n is a, c, g, or t
  misc_feature (937)..(938): n is a, c, g, or t
  misc_feature (942)..(944): n is a, c, g, or t
  misc_feature (950)..(950): n is a, c, g, or t
  misc_feature (952)..(953): n is a, c, g, or t
  misc_feature (955)..(956): n is a, c, g, or t
  misc_feature (959)..(961): n is a, c, g, or t
  misc_feature (964)..(968): n is a, c, g, or t
  misc_feature (970)..(971): n is a, c, g, or t
  misc_feature (973)..(976): n is a, c, g, or t
  misc_feature (979)..(981): n is a, c, g, or t
  misc_feature (987)..(987): n is a, c, g, or t
  misc_feature (989)..(989): n is a, c, g, or t
  misc_feature (991)..(996): n is a, c, g, or t
  misc_feature (998)..(998): n is a, c, g, or t
  misc_feature (1000)..(1015): n is a, c, g, or t
  misc_feature (1018)..(1020): n is a, c, g, or t
  misc_feature (1024)..(1024): n is a, c, g, or t
  misc_feature (1026)..(1030): n is a, c, g, or t
  misc_feature (1032)..(1032): n is a, c, g, or t
  misc_feature (1035)..(1036): n is a, c, g, or t
  misc_feature (1038)..(1045): n is a, c, g, or t
  misc_feature (1048)..(1048): n is a, c, g, or t
  misc_feature (1051)..(1054): n is a, c, g, or t
  misc_feature (1060)..(1061): n is a, c, g, or t
  misc_feature (1063)..(1064): n is a, c, g, or t
  misc_feature (1066)..(1072): n is a, c, g, or t
  misc_feature (1075)..(1077): n is a, c, g, or t
  misc_feature (1081)..(1081): n is a, c, g, or t
  misc_feature (1083)..(1086): n is a, c, g, or t
  misc_feature (1089)..(1091): n is a, c, g, or t
  misc_feature (1096)..(1103): n is a, c, g, or t
  misc_feature (1105)..(1116): n is a, c, g, or t
  misc_feature (1118)..(1118): n is a, c, g, or t
  misc_feature (1120)..(1120): n is a, c, g, or t
  misc_feature (1123)..(1126): n is a, c, g, or t
  misc_feature (1129)..(1129): n is a, c, g, or t
  misc_feature (1132)..(1132): n is a, c, g, or t
  misc_feature (1134)..(1139): n is a, c, g, or t
  misc_feature (1141)..(1151): n is a, c, g, or t
  misc_feature (1155)..(1159): n is a, c, g, or t
  misc_feature (1161)..(1162): n is a, c, g, or t
  misc_feature (1164)..(1164): n is a, c, g, or t
  misc_feature (1166)..(1166): n is a, c, g, or t
  misc_feature (1168)..(1176): n is a, c, g, or t
  misc_feature (1178)..(1179): n is a, c, g, or t
  misc_feature (1181)..(1182): n is a, c, g, or t
  misc_feature (1186)..(1190): n is a, c, g, or t
  misc_feature (1193)..(1194): n is a, c, g, or t
  misc_feature (1196)..(1200): n is a, c, g, or t
  misc_feature (1202)..(1202): n is a, c, g, or t
  misc_feature (1204)..(1206): n is a, c, g, or t
  misc_feature (1209)..(1213): n is a, c, g, or t
  misc_feature (1215)..(1216): n is a, c, g, or t
  misc_feature (1218)..(1220): n is a, c, g, or t
  misc_feature (1222)..(1224): n is a, c, g, or t
  misc_feature (1226)..(1245): n is a, c, g, or t
  misc_feature (1247)..(1250): n is a, c, g, or t
  misc_feature (1254)..(1254): n is a, c, g, or t
  misc_feature (1256)..(1260): n is a, c, g, or t
  misc_feature (1262)..(1269): n is a, c, g, or t
  misc_feature (1271)..(1273): n is a, c, g, or t
  misc_feature (1275)..(1275): n is a, c, g, or t
  misc_feature (1277)..(1279): n is a, c, g, or t
  misc_feature (1281)..(1290): n is a, c, g, or t
  misc_feature (1292)..(1292): n is a, c, g, or t
  misc_feature (1294)..(1294): n is a, c, g, or t
  misc_feature (1296)..(1308): n is a, c, g, or t
  misc_feature (1310)..(1310): n is a, c, g, or t
  misc_feature (1312)..(1314): n is a, c, g, or t
  misc_feature (1316)..(1321): n is a, c, g, or t
  misc_feature (1323)..(1338): n is a, c, g, or t
  misc_feature (1340)..(1342): n is a, c, g, or t
  misc_feature (1344)..(1345): n is a, c, g, or t
  misc_feature (1348)..(1348): n is a, c, g, or t
  misc_feature (1350)..(1352): n is a, c, g, or t
  misc_feature (1354)..(1354): n is a, c, g, or t
  misc_feature (1356)..(1356): n is a, c, g, or t
  misc_feature (1358)..(1359): n is a, c, g, or t
  misc_feature (1361)..(1361): n is a, c, g, or t
gnatagagaaattactatggagaggatcgcatcaccatcaccatcacggatcctatttaggtgacactatagaatcgtcgacccacgcgtccgttccgccgctccgccgtcgcgtttctctgccggtcgcaatggaagaagagatcgccgcgctggtcattgacaatggctccggcatgtgcaaagctggttttgctggggacgacgctccccgagccgtgtttccttccatcgtcgggcgccccagacaccagggcgtcatggtgggcatgggccagaaggactcctacgtgggcgacgaggcccagagcaagcgtggcatcctgaccctgaagtaccccattgagcatggcatcgtcaccaactgggacgacatggagaagatctggcaccacaccttctacaacgagctgcgcgtggccccggaggagcacccagtgctgctgaccgaggcccccctgaaccccaaggccaacagagagaagatgactcagattatgtttgagaccttcaacaccccggccatgtacgtggccatccaggccgtgctgtccctctacgcctctgggcgcaccactggcattgtcatggactctggagacggggtcacccacacggtgcccatctacgagggctacgccctcccccacgccatcctgcgtctggacctgnctggncgggacctgaccgactacctcatgaanatcntcactgancgaggctacancttcacccaccacngnncgaacggnaaaattcntggcncaaaatcaaaganaaactgtgctacntcncccttngnantttcaannaagaanangnncacnnccnnatcctcctntttttnggaaaaaaaantannaaantnccccaanggncaananatcnncnttgnnnaanaannnnttcnngtgtnccnnaannnnntttttcnnanncttnnnttctgnannannaannnttnnnnnanncnnnnaannncttttnantnnnnnnanannnnnnnnnnnnnnnntannnaaanannnnnancannannnnnnnnttnatnnnnaaatanntnnannnnnnnttnnnaaanannnnaannnaaatnnnnnnnntnnnnnnnnnnnntntnaannnnaanttnannnnnncnnnnnnnnnnnaaannnnntnnananannnnnnnnnannanntaannnnncanntnnnnnantnnntannnnnannannnannnannnnnnnnnnnnnnnnnnnnannnntaanannnnnannnnnnnnannntntnnnannnnnnnnnnananannnnnnnnnnnnnanannnannnnnnannnnnnnnnnnnnnnnannnannaanannntntnannan

SEQ ID NO: 508 - DNA, 1451 bp, Homo Sapiens
  misc_feature (2)..(2): n is a, c, g, or t
  misc_feature (100)..(100): n is a, c, g, or t
  misc_feature (122)..(122): n is a, c, g, or t
  misc_feature (127)..(127): n is a, c, g, or t
  misc_feature (131)..(131): n is a, c, g, or t
  misc_feature (143)..(143): n is a, c, g, or t
  misc_feature (168)..(168): n is a, c, g, or t
  misc_feature (183)..(183): n is a, c, g, or t
  misc_feature (191)..(191): n is a, c, g, or t
  misc_feature (209)..(209): n is a, c, g, or t
  misc_feature (216)..(216): n is a, c, g, or t
  misc_feature (222)..(222): n is a, c, g, or t
  misc_feature (234)..(234): n is a, c, g, or t
  misc_feature (241)..(241): n is a, c, g, or t
  misc_feature (260)..(260): n is a, c, g, or t
  misc_feature (263)..(263): n is a, c, g, or t
  misc_feature (275)..(275): n is a, c, g, or t
  misc_feature (291)..(291): n is a, c, g, or t
  misc_feature (321)..(321): n is a, c, g, or t
  misc_feature (323)..(323): n is a, c, g, or t
  misc_feature (353)..(353): n is a, c, g, or t
  misc_feature (357)..(358): n is a, c, g, or t
  misc_feature (362)..(362): n is a, c, g, or t
  misc_feature (365)..(366): n is a, c, g, or t
  misc_feature (393)..(394): n is a, c, g, or t
  misc_feature (425)..(425): n is a, c, g, or t
  misc_feature (434)..(434): n is a, c, g, or t
  misc_feature (439)..(439): n is a, c, g, or t
  misc_feature (462)..(462): n is a, c, g, or t
  misc_feature (477)..(478): n is a, c, g, or t
  misc_feature (480)..(480): n is a, c, g, or t
  misc_feature (490)..(493): n is a, c, g, or t
  misc_feature (497)..(497): n is a, c, g, or t
  misc_feature (502)..(503): n is a, c, g, or t
  misc_feature (519)..(519): n is a, c, g, or t
  misc_feature (529)..(529): n is a, c, g, or t
  misc_feature (535)..(535): n is a, c, g, or t
  misc_feature (551)..(551): n is a, c, g, or t
  misc_feature (554)..(554): n is a, c, g, or t
  misc_feature (565)..(565): n is a, c, g, or t
  misc_feature (572)..(572): n is a, c, g, or t
  misc_feature (590)..(590): n is a, c, g, or t
  misc_feature (602)..(602): n is a, c, g, or t
  misc_feature (604)..(604): n is a, c, g, or t
  misc_feature (620)..(620): n is a, c, g, or t
  misc_feature (632)..(632): n is a, c, g, or t
  misc_feature (637)..(637): n is a, c, g, or t
  misc_feature (640)..(640): n is a, c, g, or t
  misc_feature (655)..(655): n is a, c, g, or t
  misc_feature (672)..(673): n is a, c, g, or t
  misc_feature (675)..(675): n is a, c, g, or t
  misc_feature (684)..(684): n is a, c, g, or t
  misc_feature (686)..(686): n is a, c, g, or t
  misc_feature (702)..(702): n is a, c, g, or t
  misc_feature (711)..(711): n is a, c, g, or t
  misc_feature (723)..(723): n is a, c, g, or t
  misc_feature (725)..(725): n is a, c, g, or t
  misc_feature (733)..(734): n is a, c, g, or t
  misc_feature (752)..(752): n is a, c, g, or t
  misc_feature (769)..(769): n is a, c, g, or t
  misc_feature (778)..(778): n is a, c, g, or t
  misc_feature (788)..(788): n is a, c, g, or t
  misc_feature (791)..(791): n is a, c, g, or t
  misc_feature (800)..(800): n is a, c, g, or t
  misc_feature (802)..(802): n is a, c, g, or t
  misc_feature (805)..(806): n is a, c, g, or t
  misc_feature (809)..(809): n is a, c, g, or t
  misc_feature (813)..(813): n is a, c, g, or t
  misc_feature (818)..(819): n is a, c, g, or t
  misc_feature (822)..(822): n is a, c, g, or t
  misc_feature (839)..(839): n is a, c, g, or t
  misc_feature (855)..(855): n is a, c, g, or t
  misc_feature (860)..(860): n is a, c, g, or t
  misc_feature (863)..(863): n is a, c, g, or t
  misc_feature (866)..(867): n is a, c, g, or t
  misc_feature (869)..(870): n is a, c, g, or t
  misc_feature (883)..(883): n is a, c, g, or t
  misc_feature (894)..(894): n is a, c, g, or t
  misc_feature (897)..(897): n is a, c, g, or t
  misc_feature (901)..(901): n is a, c, g, or t
  misc_feature (905)..(906): n is a, c, g, or t
  misc_feature (916)..(916): n is a, c, g, or t
  misc_feature (921)..(921): n is a, c, g, or t
  misc_feature (925)..(925): n is a, c, g, or t
  misc_feature (928)..(928): n is a, c, g, or t
  misc_feature (931)..(931): n is a, c, g, or t
  misc_feature (941)..(941): n is a, c, g, or t
  misc_feature (945)..(945): n is a, c, g, or t
  misc_feature (950)..(950): n is a, c, g, or t
  misc_feature (952)..(952): n is a, c, g, or t
  misc_feature (969)..(969): n is a, c, g, or t
  misc_feature (982)..(983): n is a, c, g, or t
  misc_feature (985)..(985): n is a, c, g, or t
  misc_feature (989)..(990): n is a, c, g, or t
  misc_feature (999)..(999): n is a, c, g, or t
  misc_feature (1001)..(1001): n is a, c, g, or t
  misc_feature (1004)..(1004): n is a, c, g, or t
  misc_feature (1007)..(1007): n is a, c, g, or t
  misc_feature (1019)..(1019): n is a, c, g, or t
  misc_feature (1021)..(1021): n is a, c, g, or t
  misc_feature (1025)..(1025): n is a, c, g, or t
  misc_feature (1027)..(1027): n is a, c, g, or t
  misc_feature (1030)..(1030): n is a, c, g, or t
  misc_feature (1038)..(1038): n is a, c, g, or t
  misc_feature (1041)..(1041): n is a, c, g, or t
  misc_feature (1047)..(1049): n is a, c, g, or t
  misc_feature (1051)..(1051): n is a, c, g, or t
  misc_feature (1063)..(1063): n is a, c, g, or t
  misc_feature (1065)..(1065): n is a, c, g, or t
  misc_feature (1067)..(1067): n is a, c, g, or t
  misc_feature (1073)..(1075): n is a, c, g, or t
  misc_feature (1078)..(1078): n is a, c, g, or t
  misc_feature (1082)..(1082): n is a, c, g, or t
  misc_feature (1086)..(1086): n is a, c, g, or t
  misc_feature (1094)..(1094): n is a, c, g, or t
  misc_feature (1101)..(1101): n is a, c, g, or t
  misc_feature (1103)..(1107): n is a, c, g, or t
  misc_feature (1125)..(1125): n is a, c, g, or t
  misc_feature (1127)..(1127): n is a, c, g, or t
  misc_feature (1130)..(1130): n is a, c, g, or t
  misc_feature (1134)..(1134): n is a, c, g, or t
  misc_feature (1145)..(1145): n is a, c, g, or t
  misc_feature (1149)..(1149): n is a, c, g, or t
  misc_feature (1151)..(1151): n is a, c, g, or t
  misc_feature (1153)..(1153): n is a, c, g, or t
  misc_feature (1155)..(1155): n is a, c, g, or t
  misc_feature (1158)..(1158): n is a, c, g, or t
  misc_feature (1161)..(1161): n is a, c, g, or t
  misc_feature (1166)..(1166): n is a, c, g, or t
  misc_feature (1171)..(1171): n is a, c, g, or t
  misc_feature (1173)..(1173): n is a, c, g, or t
  misc_feature (1180)..(1180): n is a, c, g, or t
  misc_feature (1182)..(1183): n is a, c, g, or t
  misc_feature (1193)..(1193): n is a, c, g, or t
  misc_feature (1195)..(1195): n is a, c, g, or t
  misc_feature (1205)..(1205): n is a, c, g, or t
  misc_feature (1209)..(1209): n is a, c, g, or t
  misc_feature (1211)..(1211): n is a, c, g, or t
  misc_feature (1213)..(1213): n is a, c, g, or t
  misc_feature (1222)..(1224): n is a, c, g, or t
  misc_feature (1228)..(1230): n is a, c, g, or t
  misc_feature (1233)..(1233): n is a, c, g, or t
  misc_feature (1239)..(1240): n is a, c, g, or t
  misc_feature (1253)..(1253): n is a, c, g, or t
  misc_feature (1257)..(1257): n is a, c, g, or t
  misc_feature (1259)..(1260): n is a, c, g, or t
  misc_feature (1262)..(1262): n is a, c, g, or t
  misc_feature (1264)..(1265): n is a, c, g, or t
  misc_feature (1270)..(1271): n is a, c, g, or t
  misc_feature (1280)..(1280): n is a, c, g, or t
  misc_feature (1290)..(1290): n is a, c, g, or t
  misc_feature (1293)..(1296): n is a, c, g, or t
  misc_feature (1301)..(1301): n is a, c, g, or t
  misc_feature (1309)..(1309): n is a, c, g, or t
  misc_feature (1316)..(1316): n is a, c, g, or t
  misc_feature (1319)..(1319): n is a, c, g, or t
  misc_feature (1325)..(1326): n is a, c, g, or t
  misc_feature (1328)..(1329): n is a, c, g, or t
  misc_feature (1331)..(1332): n is a, c, g, or t
  misc_feature (1340)..(1342): n is a, c, g, or t
  misc_feature (1346)..(1346): n is a, c, g, or t
  misc_feature (1351)..(1352): n is a, c, g, or t
  misc_feature (1355)..(1358): n is a, c, g, or t
  misc_feature (1362)..(1363): n is a, c, g, or t
  misc_feature (1365)..(1366): n is a, c, g, or t
  misc_feature (1374)..(1374): n is a, c, g, or t
  misc_feature (1384)..(1385): n is a, c, g, or t
  misc_feature (1407)..(1407): n is a, c, g, or t
  misc_feature (1409)..(1409): n is a, c, g, or t
  misc_feature (1411)..(1412): n is a, c, g, or t
  misc_feature (1414)..(1414): n is a, c, g, or t
  misc_feature (1426)..(1428): n is a, c, g, or t
  misc_feature (1431)..(1431): n is a, c, g, or t
  misc_feature (1434)..(1434): n is a, c, g, or t
  misc_feature (1440)..(1440): n is a, c, g, or t
  misc_feature (1446)..(1446): n is a, c, g, or t
  misc_feature (1451)..(1451): n is a, c, g, or t
cnaatagagaaattaactatgagaggatcgcatcaccatcaccatcacggatcctatttaggtgacactatagaatcgtcgacccacgcgtccgcccccngctctgggtacccggctctgcntcgcntcgncatgatgggtcntcgtccagtgctcgtgctcagccanaacacaaagcgtgantccggaanaaaagttcaatctggaancatcaangctgcnaagactattgcngatatcntccgaacatgtttgggacncangtccatgatgantatgcttttggacccnatgggaggcattgtgatgaccaatgatggnantgccattcttcgagagattcaagtccagcntccnncggncanntccatgatcgaaattacccggacccannatgaagaggttggagatgggaccacatcagnaattattcntgcangggaaatgctgtctgtacctgancacttcctggagcannanatgcacccannnntggngatcnntgcttaccgcaaggcnttgaatgatntgatcngcaccctaaagaaaanaantatcccagtcnacatcantgacagtgatatgatgcngaacatcatcancngctctattactaccanagccatcagtcngtggncanctttggcttgcaacnttgccctgtatgctgtnnanatggtaccngnttgaggataatggtcnggaaagacnttgacataaaanantatgcaannagtggaaaaaatacctgnaggcatcattgaaaacncccgtgtcntgcctgtagncangatttaacnanganntgncccntccanntangcggcgctatatccaanaaaccctcgcattggngctgntgnaanncnntctctggaatacnagcaaaggganaancccngaanngaccattganattancacnacnagnaggactttcncccnaattncnccagagggaagtaaaantacattcccccanntnctgnnaggactttntnccnacntgaaccccgaangnggtncnccnctggaaanggncatttnnnantttaatttcaanantncctttnnntangttncaantatccccngcccttncnnnnnagcccggaaaaaagacancnaanccantttcctaaaanccgnantncnccngantccanccccncncagggcncnnaaaaaaaaananttgaaaaggnaagncncntgttgaaannnaaannntgnaaagannaattaatttcctncggntnngnannccctnngcccgacanttctccccgnggnnnnaaaantttcctcnaaataanaanaacacnncnngnnataaaatnnnccanttttnnccnnnnttcnngnntcaggggnccccaaaagnngggcccccccaaaaaactcccntncnngnaaaaaacccacnnnctnccnaccaanattttnctccn

SEQ ID NO: 509 - DNA, 1497 bp, Homo Sapiens
  misc_feature (10)..(10): n is a, c, g, or t
  misc_feature (374)..(374): n is a, c, g, or t
  misc_feature (390)..(390): n is a, c, g, or t
  misc_feature (393)..(393): n is a, c, g, or t
  misc_feature (408)..(408): n is a, c, g, or t
  misc_feature (420)..(420): n is a, c, g, or t
  misc_feature (437)..(438): n is a, c, g, or t
  misc_feature (454)..(454): n is a, c, g, or t
  misc_feature (460)..(461): n is a, c, g, or t
  misc_feature (464)..(464): n is a, c, g, or t
  misc_feature (467)..(467): n is a, c, g, or t
  misc_feature (470)..(470): n is a, c, g, or t
  misc_feature (475)..(475): n is a, c, g, or t
  misc_feature (489)..(489): n is a, c, g, or t
  misc_feature (492)..(492): n is a, c, g, or t
  misc_feature (503)..(504): n is a, c, g, or t
  misc_feature (506)..(506): n is a, c, g, or t
  misc_feature (509)..(509): n is a, c, g, or t
  misc_feature (513)..(513): n is a, c, g, or t
  misc_feature (517)..(517): n is a, c, g, or t
  misc_feature (520)..(521): n is a, c, g, or t
  misc_feature (526)..(527): n is a, c, g, or t
  misc_feature (529)..(529): n is a, c, g, or t
  misc_feature (531)..(531): n is a, c, g, or t
  misc_feature (533)..(533): n is a, c, g, or t
  misc_feature (535)..(535): n is a, c, g, or t
  misc_feature (539)..(540): n is a, c, g, or t
  misc_feature (542)..(542): n is a, c, g, or t
  misc_feature (545)..(545): n is a, c, g, or t
  misc_feature (548)..(548): n is a, c, g, or t
  misc_feature (550)..(551): n is a, c, g, or t
  misc_feature (555)..(555): n is a, c, g, or t
  misc_feature (559)..(561): n is a, c, g, or t
  misc_feature (563)..(564): n is a, c, g, or t
  misc_feature (566)..(566): n is a, c, g, or t
  misc_feature (572)..(572): n is a, c, g, or t
  misc_feature (576)..(576): n is a, c, g, or t
  misc_feature (587)..(587): n is a, c, g, or t
  misc_feature (593)..(596): n is a, c, g, or t
  misc_feature (599)..(600): n is a, c, g, or t
  misc_feature (603)..(603): n is a, c, g, or t
  misc_feature (607)..(607): n is a, c, g, or t
  misc_feature (609)..(609): n is a, c, g, or t
  misc_feature (612)..(612): n is a, c, g, or t
  misc_feature (616)..(616): n is a, c, g, or t
  misc_feature (619)..(619): n is a, c, g, or t
  misc_feature (622)..(622): n is a, c, g, or t
  misc_feature (627)..(627): n is a, c, g, or t
  misc_feature (629)..(629): n is a, c, g, or t
  misc_feature (631)..(631): n is a, c, g, or t
  misc_feature (638)..(639): n is a, c, g, or t
  misc_feature (644)..(644): n is a, c, g, or t
  misc_feature (648)..(648): n is a, c, g, or t
  misc_feature (650)..(651): n is a, c, g, or t
  misc_feature (653)..(653): n is a, c, g, or t
  misc_feature (655)..(657): n is a, c, g, or t
  misc_feature (662)..(662): n is a, c, g, or t
  misc_feature (666)..(666): n is a, c, g, or t
  misc_feature (669)..(670): n is a, c, g, or t
  misc_feature (672)..(672): n is a, c, g, or t
  misc_feature (677)..(677): n is a, c, g, or t
  misc_feature (679)..(679): n is a, c, g, or t
  misc_feature (682)..(682): n is a, c, g, or t
  misc_feature (685)..(686): n is a, c, g, or t
  misc_feature (693)..(694): n is a, c, g, or t
  misc_feature (696)..(697): n is a, c, g, or t
  misc_feature (699)..(699): n is a, c, g, or t
  misc_feature (704)..(704): n is a, c, g, or t
  misc_feature (709)..(710): n is a, c, g, or t
  misc_feature (713)..(715): n is a, c, g, or t
  misc_feature (720)..(723): n is a, c, g, or t
  misc_feature (725)..(725): n is a, c, g, or t
  misc_feature (727)..(727): n is a, c, g, or t
  misc_feature (732)..(733): n is a, c, g, or t
  misc_feature (738)..(738): n is a, c, g, or t
  misc_feature (741)..(742): n is a, c, g, or t
  misc_feature (747)..(748): n is a, c, g, or t
  misc_feature (751)..(751): n is a, c, g, or t
  misc_feature (754)..(756): n is a, c, g, or t
  misc_feature (758)..(760): n is a, c, g, or t
  misc_feature (764)..(764): n is a, c, g, or t
  misc_feature (766)..(766): n is a, c, g, or t
  misc_feature (769)..(769): n is a, c, g, or t
  misc_feature (771)..(772): n is a, c, g, or t
  misc_feature (774)..(775): n is a, c, g, or t
  misc_feature (781)..(781): n is a, c, g, or t
  misc_feature (783)..(783): n is a, c, g, or t
  misc_feature (785)..(785): n is a, c, g, or t
  misc_feature (797)..(797): n is a, c, g, or t
  misc_feature (799)..(800): n is a, c, g, or t
  misc_feature (804)..(805): n is a, c, g, or t
  misc_feature (811)..(811): n is a, c, g, or t
  misc_feature (824)..(824): n is a, c, g, or t
  misc_feature (829)..(829): n is a, c, g, or t
  misc_feature (832)..(832): n is a, c, g, or t
  misc_feature (834)..(836): n is a, c, g, or t
  misc_feature (843)..(843): n is a, c, g, or t
  misc_feature (846)..(846): n is a, c, g, or t
  misc_feature (848)..(848): n is a, c, g, or t
  misc_feature (853)..(853): n is a, c, g, or t
  misc_feature (855)..(855): n is a, c, g, or t
  misc_feature (857)..(857): n is a, c, g, or t
  misc_feature (860)..(861): n is a, c, g, or t
  misc_feature (866)..(866): n is a, c, g, or t
  misc_feature (869)..(869): n is a, c, g, or t
  misc_feature (872)..(872): n is a, c, g, or t
  misc_feature (879)..(880): n is a, c, g, or t
  misc_feature (884)..(884): n is a, c, g, or t
  misc_feature (891)..(891): n is a, c, g, or t
  misc_feature (897)..(897): n is a, c, g, or t
  misc_feature (902)..(902): n is a, c, g, or t
  misc_feature (904)..(906): n is a, c, g, or t
  misc_feature (912)..(912): n is a, c, g, or t
  misc_feature (914)..(914): n is a, c, g, or t
  misc_feature (917)..(917): n is a, c, g, or t
  misc_feature (921)..(921): n is a, c, g, or t
  misc_feature (923)..(923): n is a, c, g, or t
  misc_feature (928)..(928): n is a, c, g, or t
  misc_feature (935)..(937): n is a, c, g, or t
  misc_feature (939)..(939): n is a, c, g, or t
  misc_feature (941)..(941): n is a, c, g, or t
  misc_feature (948)..(951): n is a, c, g, or t
  misc_feature (953)..(953): n is a, c, g, or t
  misc_feature (957)..(957): n is a, c, g, or t
  misc_feature (961)..(962): n is a, c, g, or t
  misc_feature (972)..(972): n is a, c, g, or t
  misc_feature (974)..(974): n is a, c, g, or t
  misc_feature (978)..(978): n is a, c, g, or t
  misc_feature (989)..(989): n is a, c, g, or t
  misc_feature (992)..(995): n is a, c, g, or t
  misc_feature (997)..(998): n is a, c, g, or t
  misc_feature (1007)..(1007): n is a, c, g, or t
  misc_feature (1010)..(1010): n is a, c, g, or t
  misc_feature (1012)..(1012): n is a, c, g, or t
  misc_feature (1014)..(1014): n is a, c, g, or t
  misc_feature (1017)..(1017): n is a, c, g, or t
  misc_feature (1019)..(1020): n is a, c, g, or t
  misc_feature (1024)..(1025): n is a, c, g, or t
  misc_feature (1031)..(1031): n is a, c, g, or t
  misc_feature (1035)..(1035): n is a, c, g, or t
  misc_feature (1040)..(1040): n is a, c, g, or t
  misc_feature (1043)..(1043): n is a, c, g, or t
  misc_feature (1053)..(1054): n is a, c, g, or t
  misc_feature (1056)..(1056): n is a, c, g, or t
  misc_feature (1062)..(1062): n is a, c, g, or t
  misc_feature (1064)..(1064): n is a, c, g, or t
  misc_feature (1066)..(1066): n is a, c, g, or t
  misc_feature (1075)..(1078): n is a, c, g, or t
  misc_feature (1088)..(1089): n is a, c, g, or t
  misc_feature (1091)..(1092): n is a, c, g, or t
  misc_feature (1095)..(1095): n is a, c, g, or t
  misc_feature (1097)..(1098): n is a, c, g, or t
  misc_feature (1101)..(1101): n is a, c, g, or t
  misc_feature (1103)..(1103): n is a, c, g, or t
  misc_feature (1106)..(1106): n is a, c, g, or t
  misc_feature (1108)..(1109): n is a, c, g, or t
  misc_feature (1112)..(1112): n is a, c, g, or t
  misc_feature (1115)..(1117): n is a, c, g, or t
  misc_feature (1121)..(1123): n is a, c, g, or t
  misc_feature (1127)..(1128): n is a, c, g, or t
  misc_feature (1131)..(1131): n is a, c, g, or t
  misc_feature (1134)..(1134): n is a, c, g, or t
  misc_feature (1138)..(1138): n is a, c, g, or t
  misc_feature (1140)..(1140): n is a, c, g, or t
  misc_feature (1142)..(1142): n is a, c, g, or t
  misc_feature (1146)..(1146): n is a, c, g, or t
  misc_feature (1148)..(1148): n is a, c, g, or t
  misc_feature (1150)..(1150): n is a, c, g, or t
  misc_feature (1152)..(1152): n is a, c, g, or t
  misc_feature (1154)..(1154): n is a, c, g, or t
  misc_feature (1159)..(1160): n is a, c, g, or t
  misc_feature (1163)..(1164): n is a, c, g, or t
  misc_feature (1167)..(1167): n is a, c, g, or t
  misc_feature (1170)..(1170): n is a, c, g, or t
  misc_feature (1175)..(1178): n is a, c, g, or t
  misc_feature (1182)..(1182): n is a, c, g, or t
  misc_feature (1185)..(1186): n is a, c, g, or t
  misc_feature (1190)..(1190): n is a, c, g, or t
  misc_feature (1193)..(1193): n is a, c, g, or t
  misc_feature (1195)..(1197): n is a, c, g, or t
  misc_feature (1199)..(1199): n is a, c, g, or t
  misc_feature (1208)..(1209): n is a, c, g, or t
  misc_feature (1216)..(1219): n is a, c, g, or t
  misc_feature (1223)..(1224): n is a, c, g, or t
  misc_feature (1226)..(1226): n is a, c, g, or t
  misc_feature (1228)..(1228): n is a, c, g, or t
  misc_feature (1236)..(1236): n is a, c, g, or t
  misc_feature (1238)..(1238): n is a, c, g, or t
  misc_feature (1240)..(1241): n is a, c, g, or t
  misc_feature (1243)..(1243): n is a, c, g, or t
  misc_feature (1245)..(1245): n is a, c, g, or t
  misc_feature (1249)..(1250): n is a, c, g, or t
  misc_feature (1252)..(1252): n is a, c, g, or t
  misc_feature (1257)..(1260): n is a, c, g, or t
  misc_feature (1268)..(1268): n is a, c, g, or t
  misc_feature (1272)..(1275): n is a, c, g, or t
  misc_feature (1283)..(1283): n is a, c, g, or t
  misc_feature (1285)..(1285): n is a, c, g, or t
  misc_feature (1288)..(1288): n is a, c, g, or t
  misc_feature (1292)..(1292): n is a, c, g, or t
  misc_feature (1298)..(1299): n is a, c, g, or t
  misc_feature (1307)..(1309): n is a, c, g, or t
  misc_feature (1315)..(1315): n is a, c, g, or t
  misc_feature (1323)..(1323): n is a, c, g, or t
  misc_feature (1326)..(1326): n is a, c, g, or t
  misc_feature (1330)..(1330): n is a, c, g, or t
  misc_feature (1338)..(1338): n is a, c, g, or t
  misc_feature (1340)..(1341): n is a, c, g, or t
  misc_feature (1350)..(1350): n is a, c, g, or t
  misc_feature (1352)..(1352): n is a, c, g, or t
  misc_feature (1354)..(1354): n is a, c, g, or t
  misc_feature (1358)..(1358): n is a, c, g, or t
  misc_feature (1360)..(1360): n is a, c, g, or t
  misc_feature (1364)..(1364): n is a, c, g, or t
  misc_feature (1376)..(1378): n is a, c, g, or t
  misc_feature (1380)..(1381): n is a, c, g, or t
  misc_feature (1383)..(1383): n is a, c, g, or t
  misc_feature (1388)..(1389): n is a, c, g, or t
  misc_feature (1393)..(1393): n is a, c, g, or t
  misc_feature (1397)..(1397): n is a, c, g, or t
  misc_feature (1401)..(1401): n is a, c, g, or t
  misc_feature (1403)..(1403): n is a, c, g, or t
  misc_feature (1408)..(1408): n is a, c, g, or t
  misc_feature (1410)..(1410): n is a, c, g, or t
  misc_feature (1416)..(1416): n is a, c, g, or t
  misc_feature (1421)..(1421): n is a, c, g, or t
  misc_feature (1423)..(1423): n is a, c, g, or t
  misc_feature (1425)..(1425): n is a, c, g, or t
  misc_feature (1433)..(1435): n is a, c, g, or t
  misc_feature (1442)..(1442): n is a, c, g, or t
  misc_feature (1446)..(1446): n is a, c, g, or t
  misc_feature (1452)..(1452): n is a, c, g, or t
  misc_feature (1455)..(1455): n is a, c, g, or t
  misc_feature (1459)..(1459): n is a, c, g, or t
  misc_feature (1465)..(1465): n is a, c, g, or t
  misc_feature (1467)..(1467): n is a, c, g, or t
  misc_feature (1471)..(1471): n is a, c, g, or t
  misc_feature (1475)..(1475): n is a, c, g, or t
  misc_feature (1477)..(1477): n is a, c, g, or t
  misc_feature (1479)..(1479): n is a, c, g, or t
  misc_feature (1481)..(1481): n is a, c, g, or t
  misc_feature (1483)..(1483): n is a, c, g, or t
  misc_feature (1486)..(1486): n is a, c, g, or t
  misc_feature (1488)..(1488): n is a, c, g, or t
  misc_feature (1493)..(1493): n is a, c, g, or t
  misc_feature (1496)..(1497): n is a, c, g, or t
caatagaganattactatgagaggatcgcatcaccatcaccatcacggatcctatttaggtgacactatagaatcgtcgacccacgcgtccgagcctttggggctcagggtctggcagttcgtctctgctgtgctcttctccggcattgccatcatggcgcttgccttccctgaccagctctatgatgcggtctttgatggagcccaggtgaccagcaagacccccatccgcctctacggcggtgccctcctcagcatctccctgatcatgtggaacgctctctacacggctgagaaggtcatcattcgatggaccctgctcaccgaagcttgctatttcggggtccagttcttggtggtcactgccacgctanctgagacgggcctcangtncctggggatcctgcngctcctggtcanccgcctcctttttgtcnncatcaacatttactanaattannaanaangantgaanacaccaaaaaggcntanttgccccgacnngnccnatanaacnagnncaaanncngngnangtannancanccnannaccntcannncnncngtttcnatcngtagaaacaanaaaaannnnaanntgncacnanatnccantcnaanccccnancnacagtcnncaaanaaancnnanannnccacncccnaannanaggcntnaanaannaggacannanntnaaaantatcnnttnnnacacnnnnananagtannaaacnaanntccannaanagnnnannntccncnttnanncnnacaaanananctcaaattaaanannttannacaacncagaaaacaacangcaanaanannncttcaanatncnttcancnancannacaantcntanaacaaannatanatccatncaaaangaacnannncttccnanccnactncntgtantataaannnanangtaaaannnnancganaaanntactaaaacnantacncacaaattacnacnnnnanntactccaancanananacnannaatnnaacatnaacnacatnacntaataacctnnancaaaanancncaacatatnnnnccaacacaannannacnannacncnctnanntgnaannncccnnntcanntgnaancagntnanaacncncntnanattanntannaanaanaatannnnaccnaannaatnaantnnncncacacatanngcaagannnnaccnnanantatatgananannananaatnnancaagnnnnatacacanaagnnnncaccaaananatncaanaaatcnntacaagtnnnaataanccatcatntanacanacattctncnnataacactnananaatnanaccntctaatcatatnnntnnancactnncacnacantacnancaccncncactanacacnantnaacaacannncaaactnagcntcaacnganacanactcananacanccanananancnacnanacatnaann

SEQ ID NO: 510 - DNA, 1426 bp, Homo Sapiens
  misc_feature (2)..(2): n is a, c, g, or t
  misc_feature (4)..(5): n is a, c, g, or t
  misc_feature (11)..(11): n is a, c, g, or t
  misc_feature (683)..(683): n is a, c, g, or t
  misc_feature (687)..(687): n is a, c, g, or t
  misc_feature (693)..(693): n is a, c, g, or t
  misc_feature (720)..(720): n is a, c, g, or t
  misc_feature (724)..(724): n is a, c, g, or t
  misc_feature (738)..(738): n is a, c, g, or t
  misc_feature (747)..(747): n is a, c, g, or t
  misc_feature (768)..(768): n is a, c, g, or t
  misc_feature (770)..(770): n is a, c, g, or t
  misc_feature (772)..(772): n is a, c, g, or t
  misc_feature (776)..(776): n is a, c, g, or t
  misc_feature (781)..(781): n is a, c, g, or t
  misc_feature (804)..(804): n is a, c, g, or t
  misc_feature (808)..(809): n is a, c, g, or t
  misc_feature (811)..(811): n is a, c, g, or t
  misc_feature (813)..(814): n is a, c, g, or t
  misc_feature (816)..(816): n is a, c, g, or t
  misc_feature (820)..(820): n is a, c, g, or t
  misc_feature (824)..(824): n is a, c, g, or t
  misc_feature (836)..(836): n is a, c, g, or t
  misc_feature (848)..(848): n is a, c, g, or t
  misc_feature (853)..(855): n is a, c, g, or t
  misc_feature (863)..(863): n is a, c, g, or t
  misc_feature (875)..(875): n is a, c, g, or t
  misc_feature (879)..(880): n is a, c, g, or t
  misc_feature (886)..(886): n is a, c, g, or t
  misc_feature (896)..(896): n is a, c, g, or t
  misc_feature (899)..(899): n is a, c, g, or t
  misc_feature (902)..(902): n is a, c, g, or t
  misc_feature (907)..(907): n is a, c, g, or t
  misc_feature (911)..(911): n is a, c, g, or t
  misc_feature (914)..(915): n is a, c, g, or t
  misc_feature (919)..(919): n is a, c, g, or t
  misc_feature (933)..(933): n is a, c, g, or t
  misc_feature (938)..(938): n is a, c, g, or t
  misc_feature (942)..(942): n is a, c, g, or t
  misc_feature (946)..(946): n is a, c, g, or t
  misc_feature (951)..(952): n is a, c, g, or t
  misc_feature (954)..(955): n is a, c, g, or t
  misc_feature (960)..(961): n is a, c, g, or t
  misc_feature (965)..(965): n is a, c, g, or t
  misc_feature (969)..(969): n is a, c, g, or t
  misc_feature (980)..(980): n is a, c, g, or t
  misc_feature (984)..(984): n is a, c, g, or t
  misc_feature (987)..(987): n is a, c, g, or t
  misc_feature (1002)..(1005): n is a, c, g, or t
  misc_feature (1007)..(1011): n is a, c, g, or t
  misc_feature (1014)..(1014): n is a, c, g, or t
  misc_feature (1018)..(1018): n is a, c, g, or t
  misc_feature (1022)..(1023): n is a, c, g, or t
  misc_feature (1026)..(1027): n is a, c, g, or t
  misc_feature (1030)..(1031): n is a, c, g, or t
  misc_feature (1036)..(1036): n is a, c, g, or t
  misc_feature (1043)..(1043): n is a, c, g, or t
  misc_feature (1045)..(1045): n is a, c, g, or t
  misc_feature (1049)..(1051): n is a, c, g, or t
  misc_feature (1058)..(1058): n is a, c, g, or t
  misc_feature (1062)..(1063): n is a, c, g, or t
  misc_feature (1066)..(1066): n is a, c, g, or t
  misc_feature (1076)..(1076): n is a, c, g, or t
  misc_feature (1088)..(1091): n is a, c, g, or t
  misc_feature (1093)..(1093): n is a, c, g, or t
  misc_feature (1104)..(1105): n is a, c, g, or t
  misc_feature (1110)..(1110): n is a, c, g, or t
  misc_feature (1114)..(1114): n is a, c, g, or t
  misc_feature (1116)..(1116): n is a, c, g, or t
  misc_feature (1119)..(1119): n is a, c, g, or t
  misc_feature (1127)..(1127): n is a, c, g, or t
  misc_feature (1134)..(1134): n is a, c, g, or t
  misc_feature (1137)..(1138): n is a, c, g, or t
  misc_feature (1141)..(1141): n is a, c, g, or t
  misc_feature (1146)..(1147): n is a, c, g, or t
  misc_feature (1151)..(1151): n is a, c, g, or t
  misc_feature (1156)..(1156): n is a, c, g, or t
  misc_feature (1158)..(1158): n is a, c, g, or t
  misc_feature (1162)..(1162): n is a, c, g, or t
  misc_feature (1164)..(1164): n is a, c, g, or t
  misc_feature (1166)..(1170): n is a, c, g, or t
  misc_feature (1172)..(1172): n is a, c, g, or t
  misc_feature (1178)..(1178): n is a, c, g, or t
  misc_feature (1180)..(1180): n is a, c, g, or t
  misc_feature (1182)..(1182): n is a, c, g, or t
  misc_feature (1184)..(1184): n is a, c, g, or t
  misc_feature (1186)..(1186): n is a, c, g, or t
  misc_feature (1189)..(1189): n is a, c, g, or t
  misc_feature (1200)..(1200): n is a, c, g, or t
  misc_feature (1210)..(1210): n is a, c, g, or t
  misc_feature (1212)..(1212): n is a, c, g, or t
  misc_feature (1214)..(1215): n is a, c, g, or t
  misc_feature (1217)..(1218): n is a, c, g, or t
  misc_feature (1221)..(1222): n is a, c, g, or t
  misc_feature (1226)..(1226): n is a, c, g, or t
  misc_feature (1230)..(1230): n is a, c, g, or t
  misc_feature (1232)..(1232): n is a, c, g, or t
  misc_feature (1243)..(1243): n is a, c, g, or t
  misc_feature (1246)..(1248): n is a, c, g, or t
  misc_feature (1250)..(1250): n is a, c, g, or t
  misc_feature (1254)..(1254): n is a, c, g, or t
  misc_feature (1256)..(1258): n is a, c, g, or t
  misc_feature (1261)..(1261): n is a, c, g, or t
  misc_feature (1268)..(1268): n is a, c, g, or t
  misc_feature (1270)..(1270): n is a, c, g, or t
  misc_feature (1272)..(1272): n is a, c, g, or t
  misc_feature (1276)..(1276): n is a, c, g, or t
  misc_feature (1278)..(1279): n is a, c, g, or t
  misc_feature (1285)..(1285): n is a, c, g, or t
  misc_feature (1294)..(1294): n is a, c, g, or t
  misc_feature (1302)..(1302): n is a, c, g, or t
  misc_feature (1304)..(1305): n is a, c, g, or t
  misc_feature (1307)..(1307): n is a, c, g, or t
  misc_feature (1312)..(1313): n is a, c, g, or t
  misc_feature (1316)..(1316): n is a, c, g, or t
  misc_feature (1318)..(1318): n is a, c, g, or t
  misc_feature (1329)..(1329): n is a, c, g, or t
  misc_feature (1331)..(1331): n is a, c, g, or t
  misc_feature (1333)..(1333): n is a, c, g, or t
  misc_feature (1338)..(1339): n is a, c, g, or t
  misc_feature (1344)..(1344): n is a, c, g, or t
  misc_feature (1347)..(1347): n is a, c, g, or t
  misc_feature (1352)..(1352): n is a, c, g, or t
  misc_feature (1360)..(1360): n is a, c, g, or t
  misc_feature (1363)..(1363): n is a, c, g, or t
  misc_feature (1366)..(1367): n is a, c, g, or t
  misc_feature (1386)..(1386): n is a, c, g, or t
  misc_feature (1388)..(1389): n is a, c, g, or t
  misc_feature (1395)..(1395): n is a, c, g, or t
  misc_feature (1397)..(1397): n is a, c, g, or t
  misc_feature (1403)..(1403): n is a, c, g, or t
  misc_feature (1408)..(1409): n is a, c, g, or t
  misc_feature (1420)..(1420): n is a, c, g, or t
  misc_feature (1425)..(1425): n is a, c, g, or t
gnannagaganattactatgagaggatcgcatcaccatcaccatcacggatcctatttaggtgacactatagaatcgtcgacccacgcgtccgccgagcccggcgggaccatgtttcaccagcaccggctccagtgggctctacaaggcgcctctgtcgaagagccttctgctggtccccagtgccctctccctcctgctcgccctcctcctgcctcactgccagaagctctttgtgtatgaccttcacgcagtcaagaacgacttccagatttggaggttgatatgtggaagaataatttgccttgatttgaaagatactttctgcagtagtctgcttatttataattttaggatatttgaaagaagatatggaagcagaaaatttgcatcctttttgctgggttcctgggttttgtcagccttatttgactttctcctcattgaagctatgcagtatttctttggcatcactgcagctagtaatttgccttctggattcctggcacctgtgtttgctctgtttgtaccattttactgctccataccaagagtccaagtggcacaaattctgggtccgttgtccatcacaaaacaagacattgatttatatattgggactgcagcttttcacctctggttcctacatctggattgtaagccataagtggacttatgtccggnctgngctacnacagcaaaaatgttccaaggtgcatcnaggngcctctgcattccncagctggangggcaaaaattcttttcttgnanancttngaaanccatcttctctttcttcaaaaanccannancnnanccanaaantggtatgggaanccacccctgganatccnnngaaacaancaaaaaaatggnaacnngctggnaccgggaagnctnaanagttnctcncanntttngcacaaggggagcncaaanaganaacnaacanncnnggaannaaangaancaaattggaancctnccnttttccccccttaannnncnnnnnaanaaancgtnnatnntannggggncggttcngncaannnttaaaanccannaancatccccctnctaaaagagttnnnnanaaaaaaggacnnccccngctncnatngaaaaagngaatttnctnnaangaaanntcanaaaancncccnanannnnncnaaaaancncnananagngccccccaaanttccacgagncncnncnnaanncccncggncnaaaattggacntannngncccncnnntanaattgtntngnaccncnnccatcntacaatccnaaggaacnannantctanntantntatagtacttnantnacaanngatanaancaacnctacatcntcnatnncatcagcactaaaatgatnanntatgangngaaganatganncgaccatatanctatna

SEQ ID NO: 511 - DNA, 1243 bp, Homo Sapiens
  misc_feature (740)..(740): n is a, c, g, or t
  misc_feature (838)..(838): n is a, c, g, or t
  misc_feature (840)..(840): n is a, c, g, or t
  misc_feature (863)..(863): n is a, c, g, or t
  misc_feature (871)..(871): n is a, c, g, or t
  misc_feature (876)..(876): n is a, c, g, or t
  misc_feature (906)..(906): n is a, c, g, or t
  misc_feature (923)..(923): n is a, c, g, or t
  misc_feature (938)..(938): n is a, c, g, or t
  misc_feature (957)..(957): n is a, c, g, or t
  misc_feature (962)..(962): n is a, c, g, or t
  misc_feature (967)..(967): n is a, c, g, or t
  misc_feature (978)..(978): n is a, c, g, or t
  misc_feature (990)..(990): n is a, c, g, or t
  misc_feature (993)..(993): n is a, c, g, or t
  misc_feature (995)..(995): n is a, c, g, or t
  misc_feature (1002)..(1002): n is a, c, g, or t
  misc_feature (1007)..(1007): n is a, c, g, or t
  misc_feature (1009)..(1009): n is a, c, g, or t
  misc_feature (1016)..(1016): n is a, c, g, or t
  misc_feature (1021)..(1021): n is a, c, g, or t
  misc_feature (1023)..(1023): n is a, c, g, or t
  misc_feature (1031)..(1031): n is a, c, g, or t
  misc_feature (1034)..(1034): n is a, c, g, or t
  misc_feature (1040)..(1040): n is a, c, g, or t
  misc_feature (1043)..(1043): n is a, c, g, or t
  misc_feature (1045)..(1045): n is a, c, g, or t
  misc_feature (1047)..(1047): n is a, c, g, or t
  misc_feature (1049)..(1049): n is a, c, g, or t
  misc_feature (1052)..(1053): n is a, c, g, or t
  misc_feature (1055)..(1055): n is a, c, g, or t
  misc_feature (1062)..(1101): n is a, c, g, or t
  misc_feature (1107)..(1107): n is a, c, g, or t
  misc_feature (1114)..(1116): n is a, c, g, or t
  misc_feature (1119)..(1119): n is a, c, g, or t
  misc_feature (1127)..(1127): n is a, c, g, or t
  misc_feature (1129)..(1130): n is a, c, g, or t
  misc_feature (1132)..(1132): n is a, c, g, or t
  misc_feature (1136)..(1138): n is a, c, g, or t
  misc_feature (1142)..(1142): n is a, c, g, or t
  misc_feature (1144)..(1145): n is a, c, g, or t
  misc_feature (1148)..(1151): n is a, c, g, or t
  misc_feature (1154)..(1159): n is a, c, g, or t
  misc_feature (1162)..(1167): n is a, c, g, or t
  misc_feature (1169)..(1169): n is a, c, g, or t
  misc_feature (1173)..(1174): n is a, c, g, or t
  misc_feature (1177)..(1178): n is a, c, g, or t
  misc_feature (1180)..(1184): n is a, c, g, or t
  misc_feature (1189)..(1190): n is a, c, g, or t
  misc_feature (1192)..(1202): n is a, c, g, or t
  misc_feature (1206)..(1207): n is a, c, g, or t
  misc_feature (1213)..(1214): n is a, c, g, or t
  misc_feature (1219)..(1220): n is a, c, g, or t
  misc_feature (1223)..(1223): n is a, c, g, or t
  misc_feature (1225)..(1233): n is a, c, g, or t
  misc_feature (1236)..(1236): n is a, c, g, or t
  misc_feature (1240)..(1241): n is a, c, g, or t
  misc_feature (1243)..(1243): n is a, c, g, or t
tagagaaattactatgagaggatcgcatcaccatcaccatcacggatcctatttaggtgacactatagaatcgtcgacccacgcgtccgcccacgcgtccggcaagcggcaccgcaagcacacacagcagcgggcggctgccctctcgctcagtaccctggccagtcccaaggggggcagtggcacagcgggcaccgagcccagcgacatcatcattcccttacggactacagagaacaactactgcccccactatgagaaggtgagtggggactacgggcaccctgtctacatcgtccaagagatgccgccccagagcccggcgaacatctactacaaggtctgagtgcccggcacggcctcaggcccccgagggacagtcggcctggaccggacctctcctttcgcccccacaccccctccccttgccagctgtgcccacctttgtatttagttttgtagtttcttggcttttataatccccctttttccctgccccctgggcttcggaggggggtgcttgtgcccctaacccccatgctcttgtgccttccccctctggccaggcctctgggctccgtgggggcgccccttcttggaaggcagggctggacactgatggacagcaggcagggagacagtcccctggccctgcccctccctcgccccccttgccaccttcccaggactgcttgtccgctatcatcactgtttttaatgcttttgtgttcattttttanctgtcaactcattttcatctgttttttgaagaaaaatggaaaaatgtaaaaggcagcccctccccaggctttgtgagcctggcccaagccagtacaananggcctggggcacgatgtggtcanccaggaancatangatgccatttctttttataaattccttggnatttctggtggggtaangggcaggccaggggntgtttcagcccatgaaggnaaaangaaantgccactgggnaaggtgtcccanccntncccttcntgaancntcctaanaaggntnatcctggnaangggggnaantnantnggnnanccttttnnnnnnnnnnnnnnnnnnnnnnnnnnnnnnnnnnnnnnnnaaaatnccctttnnnttngggggaantnntngggnnntttncnnggnnnnccnnnnnnttnnnnnngnaaannaanngnnnnnaaatnngnnnnnnnnnnngggnnaaaaannaaaannttntnnnnnnnnnaanaaanntn

SEQ ID NO: 512 - DNA, 1389 bp, Homo Sapiens
  misc_feature (799)..(799): n is a, c, g, or t
  misc_feature (837)..(837): n is a, c, g, or t
  misc_feature (870)..(870): n is a, c, g, or t
  misc_feature (905)..(905): n is a, c, g, or t
  misc_feature (907)..(907): n is a, c, g, or t
  misc_feature (921)..(921): n is a, c, g, or t
  misc_feature (931)..(931): n is a, c, g, or t
  misc_feature (949)..(949): n is a, c, g, or t
  misc_feature (953)..(953): n is a, c, g, or t
  misc_feature (976)..(976): n is a, c, g, or t
  misc_feature (989)..(989): n is a, c, g, or t
  misc_feature (1037)..(1037): n is a, c, g, or t
  misc_feature (1045)..(1045): n is a, c, g, or t
  misc_feature (1049)..(1049): n is a, c, g, or t
  misc_feature (1059)..(1059): n is a, c, g, or t
  misc_feature (1065)..(1066): n is a, c, g, or t
  misc_feature (1077)..(1077): n is a, c, g, or t
  misc_feature (1086)..(1086): n is a, c, g, or t
  misc_feature (1091)..(1091): n is a, c, g, or t
  misc_feature (1102)..(1102): n is a, c, g, or t
  misc_feature (1122)..(1124): n is a, c, g, or t
  misc_feature (1131)..(1131): n is a, c, g, or t
  misc_feature (1137)..(1137): n is a, c, g, or t
  misc_feature (1139)..(1139): n is a, c, g, or t
  misc_feature (1147)..(1147): n is a, c, g, or t
  misc_feature (1150)..(1150): n is a, c, g, or t
  misc_feature (1152)..(1152): n is a, c, g, or t
  misc_feature (1155)..(1155): n is a, c, g, or t
  misc_feature (1169)..(1169): n is a, c, g, or t
  misc_feature (1174)..(1175): n is a, c, g, or t
  misc_feature (1181)..(1183): n is a, c, g, or t
  misc_feature (1189)..(1189): n is a, c, g, or t
  misc_feature (1191)..(1191): n is a, c, g, or t
  misc_feature (1195)..(1198): n is a, c, g, or t
  misc_feature (1208)..(1208): n is a, c, g, or t
  misc_feature (1210)..(1210): n is a, c, g, or t
  misc_feature (1216)..(1216): n is a, c, g, or t
  misc_feature (1218)..(1218): n is a, c, g, or t
  misc_feature (1221)..(1221): n is a, c, g, or t
  misc_feature (1230)..(1233): n is a, c, g, or t
  misc_feature (1235)..(1235): n is a, c, g, or t
  misc_feature (1248)..(1249): n is a, c, g, or t
  misc_feature (1265)..(1265): n is a, c, g, or t
  misc_feature (1267)..(1267): n is a, c, g, or t
  misc_feature (1273)..(1273): n is a, c, g, or t
  misc_feature (1276)..(1276): n is a, c, g, or t
  misc_feature (1278)..(1280): n is a, c, g, or t
  misc_feature (1290)..(1291): n is a, c, g, or t
  misc_feature (1305)..(1308): n is a, c, g, or t
  misc_feature (1321)..(1321): n is a, c, g, or t
  misc_feature (1323)..(1323): n is a, c, g, or t
  misc_feature (1327)..(1327): n is a, c, g, or t
  misc_feature (1329)..(1329): n is a, c, g, or t
  misc_feature (1333)..(1334): n is a, c, g, or t
  misc_feature (1336)..(1337): n is a, c, g, or t
  misc_feature (1343)..(1346): n is a, c, g, or t
  misc_feature (1349)..(1351): n is a, c, g, or t
  misc_feature (1353)..(1354): n is a, c, g, or t
  misc_feature (1358)..(1358): n is a, c, g, or t
  misc_feature (1364)..(1365): n is a, c, g, or t
  misc_feature (1367)..(1367): n is a, c, g, or t
  misc_feature (1371)..(1371): n is a, c, g, or t
  misc_feature (1377)..(1377): n is a, c, g, or t
  misc_feature (1384)..(1384): n is a, c, g, or t
  misc_feature (1386)..(1386): n is a, c, g, or t
attagagagaattactatggagaggatcgcatcaccatcaccatcacgggatcctatttaggtgacactatagaatcgtcgacccacgcgtccgcccacgcgtccggtgagaacgtgttcaaggtctgtgacgagccccacccactgctggtaaaggagatgatccagcactgtgtgaatgccaacattgacgaagcctacaagattcttgctcacttgtggcatctgggctactcaccagaagatatcattggcaacatctttcgagtgtgtaaaactttccaaatggcagaatacctgaaactggagtttatcaaggaaattggatacactcacatgaaaatagcggaaggagtgaactctcttttgcagatggcaggcctcctggcaaggctgtgtcagaagacaatggccccggtggccagttagagcagagacttcactgactgacttacaggtgccctattctgaggtacaggagccgcggctttctgatgggggaaaatgccgccttaggctggagccaacatgactgtcctttaaactccagtggctggccaggcacggtggctcacgcctgtaatcccaacactttgggaggccgaggcaggtggatcacctgaggtcagaagttcgagaccagcctggccaacatggggaaaccctgtctttactaaaaatataaaaattagctgggtgtggtggcgggcacctgtaatcccagctactcgggaggctgtggcaggagaatcgcttgaacccaggaggtggaggttgcagtgagccaagatcacaccantgcactccagcctgggcgacagagtctccatctggggnaaaaaaattaaataaataaactcccgtgacttngcaaaaaaaaaaaaaaagggcggccgcctccctanantgagtcgtattaanccttaattancctgaaccttggaacccngttngaaaaatccagtaaatgacctcnaaaactccatctnggatttgttccaaaaacccctcggtttgccccccggggcgtttttttnttgggaanaaanccaaacttanctttgnncaaaattttcnggaacctanggaanccttaaatggnaaaaaaaaatccccgggatnnnccccccnttgaananttcccaanggntnccntaaaaaaaattttntaagnnttttcnnnccattncncaannnncccaaaaccnanccgttncnccnggaaatatnnnncntttttaaaacccnnaaaaaaaaataacccncntttttntcncnnnctttttttcnnttttttcccccccnnnnaaaagtccccccnanattntntagnnannaaaaannnnaannngnnaaanaaaaanntncccnctttanccctttntnaaa

SEQ ID NO: 513 - DNA, 1362 bp, Homo Sapiens
  misc_feature (2)..(2): n is a, c, g, or t
  misc_feature (517)..(517): n is a, c, g, or t
  misc_feature (714)..(714): n is a, c, g, or t
  misc_feature (718)..(718): n is a, c, g, or t
  misc_feature (745)..(745): n is a, c, g, or t
  misc_feature (748)..(748): n is a, c, g, or t
  misc_feature (761)..(761): n is a, c, g, or t
  misc_feature (765)..(765): n is a, c, g, or t
  misc_feature (777)..(777): n is a, c, g, or t
  misc_feature (790)..(790): n is a, c, g, or t
  misc_feature (792)..(792): n is a, c, g, or t
  misc_feature (795)..(795): n is a, c, g, or t
  misc_feature (814)..(814): n is a, c, g, or t
  misc_feature (818)..(818): n is a, c, g, or t
  misc_feature (836)..(836): n is a, c, g, or t
  misc_feature (841)..(841): n is a, c, g, or t
  misc_feature (849)..(849): n is a, c, g, or t
  misc_feature (855)..(856): n is a, c, g, or t
  misc_feature (860)..(860): n is a, c, g, or t
  misc_feature (873)..(874): n is a, c, g, or t
  misc_feature (884)..(884): n is a, c, g, or t
  misc_feature (888)..(888): n is a, c, g, or t
  misc_feature (895)..(895): n is a, c, g, or t
  misc_feature (897)..(897): n is a, c, g, or t
  misc_feature (902)..(902): n is a, c, g, or t
  misc_feature (905)..(905): n is a, c, g, or t
  misc_feature (908)..(908): n is a, c, g, or t
  misc_feature (910)..(910): n is a, c, g, or t
  misc_feature (919)..(919): n is a, c, g, or t
  misc_feature (922)..(922): n is a, c, g, or t
  misc_feature (945)..(946): n is a, c, g, or t
  misc_feature (951)..(951): n is a, c, g, or t
  misc_feature (954)..(954): n is a, c, g, or t
  misc_feature (962)..(962): n is a, c, g, or t
  misc_feature (975)..(975): n is a, c, g, or t
  misc_feature (998)..(998): n is a, c, g, or t
  misc_feature (1009)..(1009): n is a, c, g, or t
  misc_feature (1012)..(1012): n is a, c, g, or t
  misc_feature (1026)..(1027): n is a, c, g, or t
  misc_feature (1029)..(1029): n is a, c, g, or t
  misc_feature (1033)..(1034): n is a, c, g, or t
  misc_feature (1049)..(1049): n is a, c, g, or t
  misc_feature (1060)..(1060): n is a, c, g, or t
  misc_feature (1063)..(1063): n is a, c, g, or t
  misc_feature (1068)..(1068): n is a, c, g, or t
  misc_feature (1083)..(1084): n is a, c, g, or t
  misc_feature (1090)..(1090): n is a, c, g, or t
  misc_feature (1093)..(1093): n is a, c, g, or t
  misc_feature (1100)..(1103): n is a, c, g, or t
  misc_feature (1111)..(1112): n is a, c, g, or t
  misc_feature (1115)..(1115): n is a, c, g, or t
  misc_feature (1127)..(1127): n is a, c, g, or t
  misc_feature (1129)..(1129): n is a, c, g, or t
  misc_feature (1135)..(1137): n is a, c, g, or t
  misc_feature (1146)..(1146): n is a, c, g, or t
  misc_feature (1165)..(1167): n is a, c, g, or t
  misc_feature (1176)..(1182): n is a, c, g, or t
  misc_feature (1186)..(1186): n is a, c, g, or t
  misc_feature (1188)..(1188): n is a, c, g, or t
  misc_feature (1194)..(1195): n is a, c, g, or t
  misc_feature (1203)..(1203): n is a, c, g, or t
  misc_feature (1206)..(1208): n is a, c, g, or t
  misc_feature (1217)..(1220): n is a, c, g, or t
  misc_feature (1226)..(1226): n is a, c, g, or t
  misc_feature (1234)..(1234): n is a, c, g, or t
  misc_feature (1236)..(1237): n is a, c, g, or t
  misc_feature (1246)..(1246): n is a, c, g, or t
  misc_feature (1249)..(1249): n is a, c, g, or t
  misc_feature (1253)..(1253): n is a, c, g, or t
  misc_feature (1257)..(1260): n is a, c, g, or t
  misc_feature (1262)..(1262): n is a, c, g, or t
  misc_feature (1265)..(1265): n is a, c, g, or t
  misc_feature (1268)..(1268): n is a, c, g, or t
  misc_feature (1277)..(1277): n is a, c, g, or t
  misc_feature (1282)..(1282): n is a, c, g, or t
  misc_feature (1290)..(1291): n is a, c, g, or t
  misc_feature (1293)..(1294): n is a, c, g, or t
  misc_feature (1301)..(1301): n is a, c, g, or t
  misc_feature (1305)..(1305): n is a, c, g, or t
  misc_feature (1317)..(1318): n is a, c, g, or t
  misc_feature (1320)..(1320): n is a, c, g, or t
  misc_feature (1323)..(1326): n is a, c, g, or t
  misc_feature (1328)..(1329): n is a, c, g, or t
  misc_feature (1345)..(1346): n is a, c, g, or t
  misc_feature (1349)..(1354): n is a, c, g, or t
  misc_feature (1357)..(1357): n is a, c, g, or t
  misc_feature (1359)..(1362): n is a, c, g, or t
antagagaaattactatgagaggatcgcatcaccatcaccatcacggatcctatttaggtgacactatagaatcgtcgacccacgcgtccgctcagtctcttgcagacctccaacaacaggaagaggaaacctatgcagatgcctgtgatgagttcctggatcccattatgagcacactgatgtgtgaccctgtggtgctgccatcttccagagtcactgtggatagatccaccattgcaagacatttgctcagtgaccaaacagatccctttaaccgtagtcccctcaccatggaccagatccggccaaacacagaactaaaagaaaaaatccaacggtggcttgcagagaggaaacaacaaaaggagcaacttgaatagatactgtgaactaaccaaaccaaaaccaaccccagagtgcagataaacaattgtttgtggtttctctctttctggttctgttccttttctttcttcttttctttttctttttttttttttttttttactaaattanagaactgctcttgctgaaattatgatagttaagattcctaagaacttgacaatgctcccctggcttgcaggaaattatacttattatagcatcaccaagtttagaaatcatcactaattttcaccctctgttgtctcttcatattcttcttccttttcctaaatgaaattatattatttcaactactaaaacttccngccnccctgctatttctcttccaattactgntcnaaacatttttggngagngctggcttttanaaatatgggatgncncanattttcagtggaccgctgnatgnttttcaaaaaaaatcccngttancccggggnatttannaagncccccatggatcnnaaaccttaancccntttttcngnggttnaanaananaactttccnctnaaaaagcaaaaaaccctttttannttggnggnaaaacttncggaaaaaaaaanaaaaaaacaaaaaattttttttnaaaaaaggganttnaaagggaatcttgnncnaccnnccggggaaaaccccnttaattttttntanaccangcctttttttaaagnnggattnggnaggggcnnnncccccccnnttntgggggggggananaaaacnnntggggcccnttttttctttaaaaaaaannnttttttatnnnnnnnaaangncctaannaatttttnggnnncggggtttnnnncccccngaaaaaantnntttttaaanccnaaancccnnnntnttnccnggggggganaaaanaaaaaaannannccccccngggntttttttggttnngnaannnnannccctttttttttttcnnccnnnnnnagngnnnn

SEQ ID NO: 514 - DNA, 1441 bp, Homo Sapiens
  misc_feature (848)..(848): n is a, c, g, or t
  misc_feature (894)..(894): n is a, c, g, or t
  misc_feature (904)..(904): n is a, c, g, or t
  misc_feature (967)..(967): n is a, c, g, or t
  misc_feature (986)..(986): n is a, c, g, or t
  misc_feature (989)..(989): n is a, c, g, or t
  misc_feature (994)..(994): n is a, c, g, or t
  misc_feature (999)..(999): n is a, c, g, or t
  misc_feature (1018)..(1018): n is a, c, g, or t
  misc_feature (1023)..(1023): n is a, c, g, or t
  misc_feature (1034)..(1034): n is a, c, g, or t
  misc_feature (1036)..(1036): n is a, c, g, or t
  misc_feature (1038)..(1040): n is a, c, g, or t
  misc_feature (1043)..(1044): n is a, c, g, or t
  misc_feature (1048)..(1058): n is a, c, g, or t
  misc_feature (1067)..(1067): n is a, c, g, or t
  misc_feature (1073)..(1073): n is a, c, g, or t
  misc_feature (1081)..(1083): n is a, c, g, or t
  misc_feature (1085)..(1085): n is a, c, g, or t
  misc_feature (1087)..(1087): n is a, c, g, or t
  misc_feature (1089)..(1089): n is a, c, g, or t
  misc_feature (1091)..(1093): n is a, c, g, or t
  misc_feature (1098)..(1098): n is a, c, g, or t
  misc_feature (1109)..(1109): n is a, c, g, or t
  misc_feature (1124)..(1124): n is a, c, g, or t
  misc_feature (1137)..(1137): n is a, c, g, or t
  misc_feature (1143)..(1143): n is a, c, g, or t
  misc_feature (1146)..(1147): n is a, c, g, or t
  misc_feature (1158)..(1158): n is a, c, g, or t
  misc_feature (1162)..(1162): n is a, c, g, or t
  misc_feature (1169)..(1169): n is a, c, g, or t
  misc_feature (1173)..(1173): n is a, c, g, or t
  misc_feature (1175)..(1178): n is a, c, g, or t
  misc_feature (1206)..(1206): n is a, c, g, or t
  misc_feature (1210)..(1210): n is a, c, g, or t
  misc_feature (1213)..(1214): n is a, c, g, or t
  misc_feature (1216)..(1216): n is a, c, g, or t
  misc_feature (1218)..(1218): n is a, c, g, or t
  misc_feature (1221)..(1221): n is a, c, g, or t
  misc_feature (1228)..(1228): n is a, c, g, or t
  misc_feature (1231)..(1232): n is a, c, g, or t
  misc_feature (1234)..(1234): n is a, c, g, or t
  misc_feature (1238)..(1239): n is a, c, g, or t
  misc_feature (1250)..(1250): n is a, c, g, or t
  misc_feature (1256)..(1256): n is a, c, g, or t
  misc_feature (1260)..(1260): n is a, c, g, or t
  misc_feature (1264)..(1264): n is a, c, g, or t
  misc_feature (1267)..(1267): n is a, c, g, or t
  misc_feature (1276)..(1277): n is a, c, g, or t
  misc_feature (1280)..(1280): n is a, c, g, or t
  misc_feature (1284)..(1285): n is a, c, g, or t
  misc_feature (1302)..(1302): n is a, c, g, or t
  misc_feature (1312)..(1313): n is a, c, g, or t
  misc_feature (1318)..(1318): n is a, c, g, or t
  misc_feature (1321)..(1321): n is a, c, g, or t
  misc_feature (1323)..(1323): n is a, c, g, or t
  misc_feature (1328)..(1328): n is a, c, g, or t
  misc_feature (1333)..(1333): n is a, c, g, or t
  misc_feature (1336)..(1337): n is a, c, g, or t
  misc_feature (1355)..(1356): n is a, c, g, or t
  misc_feature (1366)..(1367): n is a, c, g, or t
  misc_feature (1375)..(1375): n is a, c, g, or t
  misc_feature (1386)..(1386): n is a, c, g, or t
  misc_feature (1391)..(1391): n is a, c, g, or t
  misc_feature (1394)..(1396): n is a, c, g, or t
  misc_feature (1399)..(1399): n is a, c, g, or t
  misc_feature (1406)..(1406): n is a, c, g, or t
  misc_feature (1415)..(1415): n is a, c, g, or t
  misc_feature (1430)..(1431): n is a, c, g, or t
  misc_feature (1436)..(1438): n is a, c, g, or t
tagagagaattactatgagaggatcgcatcaccatcaccatcacggatcctatttaggtgacactatagaatcgtcgacccacgcgtccgaccagcagttcaagaagcgttctgtggaagacctgaaggagcggtactaccacatctgtgctaagcttgccaacgtgcgggctgtgccaggcacagaccttaagataccagtatttgatgctgggcacgaacgacggcggaaggaacagcttgagcgtctctacaaccggaccccagagcaggtggcagaggaggagtacctgctacaggagctgcgcaagattgaggcccggaagaaggagcgggagaaacgcagccaggacctgcagaagctgatcacagcggcagacaccactgcagagcagcggcgcacggaacgcaaggcccccaaaaagaagctaccccagaaaaaggaggctgagaagccggctgttcctgagactgcaggcatcaagtttccagacttcaagtctgcaggtgtcacgctgcggagccaacggatgaagctgccaagctctgtgggacagaagaagatcaaggccctggaacagatgctgctggagcttggtgtggagctgagcccgacacctacggaggagctggtgcacatgttcaatgagctgcgaagcgacctggtgctgctctacgagctcaagcaggcctgtgccaactgcgagtatgagctgcagatgctgcggcaccgtcatgaggcactggcccgggctggtgtgctagggggccctgccacaccagcatcaggcccaggcccggcctctgctgagccggcagtgactgaacccggacttggtcctgacccnaggacaccatcattgatgtgggtgggcgcaccccctcacgccccanttcgagaaangcgacggggagtcggcctccagctcatcttccgtgaaaaaaagcccaaaaacccgtgaaaagnccccacgggggttgtgggnganccctnttttnttaaataaaacctgctganttggnaaaaaaaaaananannnaannaatnnnnnnnnnnnaaaaggggnggcccncccccctnnngngngncnnnttaancttaaattaantaactttggaccctntttgaaaaacccnaaatgnccnnaaaactccttntggnttttttnaaancnnnngtttccccgggggttttttttggaaaantccnccnntntnggnaattttnggnntnaggnncttaaatgggnaaaaancctnggantanccccgtttnnttncccnnggtttaaaaaattttgngggtttttcnntttcnttncntaacnaaccnttnntggaattgcctttttaannaaaaaaaaannatttttcnctttttttttncccgnagnnnccnattttanaaaaaaggngggaagaattccttnnccttnnnaaa

SEQ ID NO: 515 - DNA, 1675 bp, Homo Sapiens
  misc_feature (4)..(4): n is a, c, g, or t
  misc_feature (125)..(125): n is a, c, g, or t
  misc_feature (223)..(223): n is a, c, g, or t
  misc_feature (228)..(228): n is a, c, g, or t
  misc_feature (254)..(254): n is a, c, g, or t
  misc_feature (262)..(262): n is a, c, g, or t
  misc_feature (266)..(266): n is a, c, g, or t
  misc_feature (269)..(269): n is a, c, g, or t
  misc_feature (280)..(280): n is a, c, g, or t
  misc_feature (286)..(286): n is a, c, g, or t
  misc_feature (290)..(290): n is a, c, g, or t
  misc_feature (302)..(302): n is a, c, g, or t
  misc_feature (305)..(305): n is a, c, g, or t
  misc_feature (312)..(312): n is a, c, g, or t
  misc_feature (317)..(317): n is a, c, g, or t
  misc_feature (327)..(328): n is a, c, g, or t
  misc_feature (331)..(331): n is a, c, g, or t
  misc_feature (335)..(335): n is a, c, g, or t
  misc_feature (340)..(341): n is a, c, g, or t
  misc_feature (348)..(349): n is a, c, g, or t
  misc_feature (352)..(352): n is a, c, g, or t
  misc_feature (359)..(359): n is a, c, g, or t
  misc_feature (370)..(370): n is a, c, g, or t
  misc_feature (374)..(375): n is a, c, g, or t
  misc_feature (378)..(378): n is a, c, g, or t
  misc_feature (382)..(383): n is a, c, g, or t
  misc_feature (391)..(393): n is a, c, g, or t
  misc_feature (399)..(400): n is a, c, g, or t
  misc_feature (405)..(405): n is a, c, g, or t
  misc_feature (410)..(410): n is a, c, g, or t
  misc_feature (417)..(418): n is a, c, g, or t
  misc_feature (420)..(420): n is a, c, g, or t
  misc_feature (429)..(429): n is a, c, g, or t
  misc_feature (434)..(434): n is a, c, g, or t
  misc_feature (438)..(438): n is a, c, g, or t
  misc_feature (441)..(442): n is a, c, g, or t
  misc_feature (445)..(447): n is a, c, g, or t
  misc_feature (452)..(452): n is a, c, g, or t
  misc_feature (456)..(457): n is a, c, g, or t
  misc_feature (459)..(459): n is a, c, g, or t
  misc_feature (461)..(461): n is a, c, g, or t
  misc_feature (465)..(465): n is a, c, g, or t
  misc_feature (470)..(470): n is a, c, g, or t
  misc_feature (473)..(474): n is a, c, g, or t
  misc_feature (476)..(478): n is a, c, g, or t
  misc_feature (481)..(481): n is a, c, g, or t
  misc_feature (486)..(487): n is a, c, g, or t
  misc_feature (491)..(491): n is a, c, g, or t
  misc_feature (496)..(496): n is a, c, g, or t
  misc_feature (499)..(499): n is a, c, g, or t
  misc_feature (501)..(501): n is a, c, g, or t
  misc_feature (503)..(503): n is a, c, g, or t
  misc_feature (505)..(505): n is a, c, g, or t
  misc_feature (507)..(507): n is a, c, g, or t
  misc_feature (509)..(509): n is a, c, g, or t
  misc_feature (511)..(513): n is a, c, g, or t
  misc_feature (515)..(515): n is a, c, g, or t
  misc_feature (520)..(520): n is a, c, g, or t
  misc_feature (527)..(528): n is a, c, g, or t
  misc_feature (530)..(530): n is a, c, g, or t
  misc_feature (532)..(532): n is a, c, g, or t
  misc_feature (544)..(544): n is a, c, g, or t
  misc_feature (549)..(550): n is a, c, g, or t
  misc_feature (557)..(557): n is a, c, g, or t
  misc_feature (560)..(560): n is a, c, g, or t
  misc_feature (564)..(564): n is a, c, g, or t
  misc_feature (567)..(567): n is a, c, g, or t
  misc_feature (570)..(571): n is a, c, g, or t
  misc_feature (591)..(592): n is a, c, g, or t
  misc_feature (597)..(597): n is a, c, g, or t
  misc_feature (603)..(606): n is a, c, g, or t
  misc_feature (609)..(610): n is a, c, g, or t
  misc_feature (616)..(616): n is a, c, g, or t
  misc_feature (621)..(622): n is a, c, g, or t
  misc_feature (626)..(626): n is a, c, g, or t
  misc_feature (629)..(629): n is a, c, g, or t
  misc_feature (644)..(645): n is a, c, g, or t
  misc_feature (651)..(653): n is a, c, g, or t
  misc_feature (655)..(655): n is a, c, g, or t
  misc_feature (658)..(658): n is a, c, g, or t
  misc_feature (661)..(661): n is a, c, g, or t
  misc_feature (664)..(664): n is a, c, g, or t
  misc_feature (670)..(670): n is a, c, g, or t
  misc_feature (673)..(675): n is a, c, g, or t
  misc_feature (678)..(680): n is a, c, g, or t
  misc_feature (682)..(682): n is a, c, g, or t
  misc_feature (689)..(689): n is a, c, g, or t
  misc_feature (700)..(700): n is a, c, g, or t
  misc_feature (703)..(703): n is a, c, g, or t
  misc_feature (705)..(705): n is a, c, g, or t
  misc_feature (715)..(717): n is a, c, g, or t
  misc_feature (729)..(730): n is a, c, g, or t
  misc_feature (740)..(740): n is a, c, g, or t
  misc_feature (749)..(749): n is a, c, g, or t
  misc_feature (755)..(755): n is a, c, g, or t
  misc_feature (757)..(757): n is a, c, g, or t
  misc_feature (760)..(762): n is a, c, g, or t
  misc_feature (765)..(765): n is a, c, g, or t
  misc_feature (768)..(768): n is a, c, g, or t
  misc_feature (772)..(772): n is a, c, g, or t
  misc_feature (775)..(775): n is a, c, g, or t
  misc_feature (778)..(778): n is a, c, g, or t
  misc_feature (780)..(780): n is a, c, g, or t
  misc_feature (792)..(792): n is a, c, g, or t
  misc_feature (811)..(811): n is a, c, g, or t
  misc_feature (814)..(814): n is a, c, g, or t
  misc_feature (821)..(821): n is a, c, g, or t
  misc_feature (823)..(824): n is a, c, g, or t
  misc_feature (826)..(827): n is a, c, g, or t
  misc_feature (829)..(829): n is a, c, g, or t
  misc_feature (831)..(831): n is a, c, g, or t
  misc_feature (835)..(836): n is a, c, g, or t
  misc_feature (842)..(842): n is a, c, g, or t
  misc_feature (850)..(850): n is a, c, g, or t
  misc_feature (852)..(852): n is a, c, g, or t
  misc_feature (856)..(856): n is a, c, g, or t
  misc_feature (859)..(859): n is a, c, g, or t
  misc_feature (861)..(861): n is a, c, g, or t
  misc_feature (864)..(864): n is a, c, g, or t
  misc_feature (866)..(869): n is a, c, g, or t
  misc_feature (874)..(875): n is a, c, g, or t
  misc_feature (879)..(879): n is a, c, g, or t
  misc_feature (882)..(882): n is a, c, g, or t
  misc_feature (891)..(891): n is a, c, g, or t
  misc_feature (897)..(897): n is a, c, g, or t
  misc_feature (900)..(900): n is a, c, g, or t
  misc_feature (903)..(903): n is a, c, g, or t
  misc_feature (909)..(910): n is a, c, g, or t
  misc_feature (920)..(920): n is a, c, g, or t
  misc_feature (922)..(923): n is a, c, g, or t
  misc_feature (932)..(932): n is a, c, g, or t
  misc_feature (934)..(936): n is a, c, g, or t
  misc_feature (940)..(942): n is a, c, g, or t
  misc_feature (944)..(944): n is a, c, g, or t
  misc_feature (949)..(949): n is a, c, g, or t
  misc_feature (953)..(953): n is a, c, g, or t
  misc_feature (955)..(955): n is a, c, g, or t
  misc_feature (958)..(959): n is a, c, g, or t
  misc_feature (964)..(964): n is a, c, g, or t
  misc_feature (968)..(968): n is a, c, g, or t
  misc_feature (972)..(972): n is a, c, g, or t
  misc_feature (980)..(981): n is a, c, g, or t
  misc_feature (988)..(988): n is a, c, g, or t
  misc_feature (1001)..(1001): n is a, c, g, or t
  misc_feature (1005)..(1005): n is a, c, g, or t
  misc_feature (1007)..(1008): n is a, c, g, or t
  misc_feature (1010)..(1010): n is a, c, g, or t
  misc_feature (1014)..(1014): n is a, c, g, or t
  misc_feature (1017)..(1018): n is a, c, g, or t
  misc_feature (1020)..(1021): n is a, c, g, or t
  misc_feature (1023)..(1023): n is a, c, g, or t
  misc_feature (1026)..(1026): n is a, c, g, or t
  misc_feature (1028)..(1028): n is a, c, g, or t
  misc_feature (1030)..(1031): n is a, c, g, or t
  misc_feature (1034)..(1034): n is a, c, g, or t
  misc_feature (1038)..(1038): n is a, c, g, or t
  misc_feature (1042)..(1043): n is a, c, g, or t
  misc_feature (1058)..(1058): n is a, c, g, or t
  misc_feature (1061)..(1062): n is a, c, g, or t
  misc_feature (1070)..(1070): n is a, c, g, or t
  misc_feature (1083)..(1085): n is a, c, g, or t
  misc_feature (1088)..(1089): n is a, c, g, or t
  misc_feature (1095)..(1095): n is a, c, g, or t
  misc_feature (1102)..(1102): n is a, c, g, or t
  misc_feature (1105)..(1107): n is a, c, g, or t
  misc_feature (1114)..(1115): n is a, c, g, or t
  misc_feature (1119)..(1120): n is a, c, g, or t
  misc_feature (1123)..(1124): n is a, c, g, or t
  misc_feature (1137)..(1139): n is a, c, g, or t
  misc_feature (1144)..(1144): n is a, c, g, or t
  misc_feature (1148)..(1149): n is a, c, g, or t
  misc_feature (1151)..(1151): n is a, c, g, or t
  misc_feature (1153)..(1153): n is a, c, g, or t
  misc_feature (1157)..(1157): n is a, c, g, or t
  misc_feature (1162)..(1162): n is a, c, g, or t
  misc_feature (1168)..(1168): n is a, c, g, or t
  misc_feature (1174)..(1174): n is a, c, g, or t
  misc_feature (1177)..(1177): n is a, c, g, or t
  misc_feature (1180)..(1180): n is a, c, g, or t
  misc_feature (1182)..(1182): n is a, c, g, or t
  misc_feature (1187)..(1188): n is a, c, g, or t
  misc_feature (1192)..(1192): n is a, c, g, or t
  misc_feature (1195)..(1195): n is a, c, g, or t
  misc_feature (1199)..(1201): n is a, c, g, or t
  misc_feature (1204)..(1204): n is a, c, g, or t
  misc_feature (1206)..(1206): n is a, c, g, or t
  misc_feature (1208)..(1208): n is a, c, g, or t
  misc_feature (1210)..(1210): n is a, c, g, or t
  misc_feature (1213)..(1213): n is a, c, g, or t
  misc_feature (1216)..(1217): n is a, c, g, or t
  misc_feature (1220)..(1220): n is a, c, g, or t
  misc_feature (1222)..(1222): n is a, c, g, or t
  misc_feature (1227)..(1227): n is a, c, g, or t
  misc_feature (1229)..(1229): n is a, c, g, or t
  misc_feature (1231)..(1231): n is a, c, g, or t
  misc_feature (1233)..(1234): n is a, c, g, or t
  misc_feature (1236)..(1238): n is a, c, g, or t
  misc_feature (1240)..(1241): n is a, c, g, or t
  misc_feature (1249)..(1250): n is a, c, g, or t
  misc_feature (1256)..(1256): n is a, c, g, or t
  misc_feature (1262)..(1263): n is a, c, g, or t
  misc_feature (1266)..(1266): n is a, c, g, or t
  misc_feature (1268)..(1268): n is a, c, g, or t
  misc_feature (1270)..(1270): n is a, c, g, or t
  misc_feature (1275)..(1275): n is a, c, g, or t
  misc_feature (1278)..(1278): n is a, c, g, or t
  misc_feature (1281)..(1281): n is a, c, g, or t
  misc_feature (1286)..(1287): n is a, c, g, or t
  misc_feature (1289)..(1290): n is a, c, g, or t
  misc_feature (1293)..(1293): n is a, c, g, or t
  misc_feature (1295)..(1295): n is a, c, g, or t
  misc_feature (1298)..(1299): n is a, c, g, or t
  misc_feature (1301)..(1301): n is a, c, g, or t
  misc_feature (1308)..(1308): n is a, c, g, or t
  misc_feature (1313)..(1315): n is a, c, g, or t
  misc_feature (1324)..(1324): n is a, c, g, or t
  misc_feature (1327)..(1327): n is a, c, g, or t
  misc_feature (1331)..(1331): n is a, c, g, or t
  misc_feature (1335)..(1335): n is a, c, g, or t
  misc_feature (1341)..(1341): n is a, c, g, or t
  misc_feature (1345)..(1345): n is a, c, g, or t
  misc_feature (1353)..(1353): n is a, c, g, or t
  misc_feature (1355)..(1355): n is a, c, g, or t
  misc_feature (1358)..(1358): n is a, c, g, or t
  misc_feature (1361)..(1363): n is a, c, g, or t
  misc_feature (1367)..(1367): n is a, c, g, or t
  misc_feature (1372)..(1372): n is a, c, g, or t
  misc_feature (1384)..(1384): n is a, c, g, or t
  misc_feature (1387)..(1388): n is a, c, g, or t
  misc_feature (1390)..(1390): n is a, c, g, or t
  misc_feature (1393)..(1393): n is a, c, g, or t
  misc_feature (1397)..(1397): n is a, c, g, or t
  misc_feature (1399)..(1399): n is a, c, g, or t
  misc_feature (1404)..(1404): n is a, c, g, or t
  misc_feature (1411)..(1411): n is a, c, g, or t
  misc_feature (1416)..(1416): n is a, c, g, or t
  misc_feature (1418)..(1419): n is a, c, g, or t
  misc_feature (1421)..(1423): n is a, c, g, or t
  misc_feature (1440)..(1440): n is a, c, g, or t
  misc_feature (1449)..(1450): n is a, c, g, or t
  misc_feature (1452)..(1452): n is a, c, g, or t
  misc_feature (1461)..(1461): n is a, c, g, or t
  misc_feature (1463)..(1463): n is a, c, g, or t
  misc_feature (1466)..(1466): n is a, c, g, or t
  misc_feature (1472)..(1472): n is a, c, g, or t
  misc_feature (1476)..(1476): n is a, c, g, or t
  misc_feature (1478)..(1478): n is a, c, g, or t
  misc_feature (1480)..(1480): n is a, c, g, or t
  misc_feature (1484)..(1484): n is a, c, g, or t
  misc_feature (1488)..(1488): n is a, c, g, or t
  misc_feature (1492)..(1492): n is a, c, g, or t
  misc_feature (1495)..(1496): n is a, c, g, or t
  misc_feature (1498)..(1498): n is a, c, g, or t
  misc_feature (1503)..(1503): n is a, c, g, or t
  misc_feature (1512)..(1515): n is a, c, g, or t
  misc_feature (1517)..(1519): n is a, c, g, or t
  misc_feature (1532)..(1532): n is a, c, g, or t
  misc_feature (1534)..(1534): n is a, c, g, or t
  misc_feature (1538)..(1538): n is a, c, g, or t
  misc_feature (1546)..(1547): n is a, c, g, or t
  misc_feature (1560)..(1563): n is a, c, g, or t
  misc_feature (1581)..(1581): n is a, c, g, or t
  misc_feature (1603)..(1604): n is a, c, g, or t
  misc_feature (1608)..(1609): n is a, c, g, or t
  misc_feature (1617)..(1617): n is a, c, g, or t
  misc_feature (1619)..(1619): n is a, c, g, or t
  misc_feature (1624)..(1624): n is a, c, g, or t
  misc_feature (1634)..(1634): n is a, c, g, or t
  misc_feature (1645)..(1645): n is a, c, g, or t
  misc_feature (1652)..(1652): n is a, c, g, or t
  misc_feature (1662)..(1662): n is a, c, g, or t
  misc_feature (1668)..(1668): n is a, c, g, or t
  misc_feature (1675)..(1675): n is a, c, g, or t
aatntagagaaattactatgagaggatcgcatcaccatcaccatcacggatcctatttaggtgacactatagaatcgtcgacccacgcgttccgcccacgcgatccgcccacgcgtccgcccacncgtccgctcgtggtccggcccggcccgcgccatcaccggccctgctctgcggggccacccgtgcgccccttcgccgtccgctgactccgccctcccgnctgcngacccggccgccgaccttcccccggntctgtcgntccnaangttttctgcanccctcngtgntccaggccgcanacntgagggnggganccccggaggnnganaacngtgtnngataacnntangagaccnaacaaggctanaacnntgnaacnngtagtgtnnnaaacgnncggancattncatgtanntntacaagacngatgnttcnatnnaannntatangacnnananaagnaattnttnngnnntancaatnnaaantactnatntncncnanantnnntntaacnagataanngnantacaagagtatnatttnntaaatcntgntaancantannaattatttgaatatatatanntaatnacaccnnnnttnnaaagtnctaannatantanattcaattacattcnntcaacnnnanatnttnagnctaaanatnnngannnantccaaanagatatatcanttnanataaaatatnnnaaaattgaaatnnaatttaaatnttaattaanaataantntannnatnaanatgnatnaantnacaggtcctaanttaatttataaatatcatnaanctacctnannanntntnttcnnatttgnaaataatntncatntantnatnannnntaatnnatanacnactttcaanttaganatncanttaaannatttaatatncnnctctgtaanannnttannnanaaaangtananaanntactnaaanaaancaaatgtnnaaaaaantattgattacatnaaancnnanttancanntnntntancntnncangatnagtnnacaaaaagtaaatanttnnaaactttnaatttacattagnnnctnnttaatnataatcnaannnttaatannaaannaanntataataattatnnnaaatnctanntnanatgnaatanatttancttaantanatncntgatnntatntanatannnttnanantnaantanntancnctatntntnannannntnnaaatatannattaanctatcnnttntnanaagantanctncactnntnnctngnacnntntaaaaantaacnnncaacttttncantcancatngacacnatanatctatantntgnaannnaaanaaatncacacaacatanttnnantanatantntatanaataagncttcncnnannnaaaataactatcatatntgaatacanntngatattaananaanatctcntcanantntaantttncaanaanngnttatnacttattannnntnnnataattttacaananaatnccataatnnaatacattaactnnnnataattaaactaaaaccnttcacaaaattattattagctnncatnnttctatananagaanaaattacatnatatctaatantccacantacgttatanatttantatatan

SEQ ID NO: 516 - DNA, 1376 bp, Homo Sapiens
  misc_feature (883)..(883): n is a, c, g, or t
  misc_feature (918)..(918): n is a, c, g, or t
  misc_feature (925)..(925): n is a, c, g, or t
  misc_feature (945)..(945): n is a, c, g, or t
  misc_feature (977)..(977): n is a, c, g, or t
  misc_feature (993)..(993): n is a, c, g, or t
  misc_feature (1001)..(1001): n is a, c, g, or t
  misc_feature (1023)..(1023): n is a, c, g, or t
  misc_feature (1032)..(1032): n is a, c, g, or t
  misc_feature (1034)..(1034): n is a, c, g, or t
  misc_feature (1047)..(1047): n is a, c, g, or t
  misc_feature (1052)..(1052): n is a, c, g, or t
  misc_feature (1056)..(1057): n is a, c, g, or t
  misc_feature (1062)..(1062): n is a, c, g, or t
  misc_feature (1071)..(1071): n is a, c, g, or t
  misc_feature (1081)..(1081): n is a, c, g, or t
  misc_feature (1083)..(1083): n is a, c, g, or t
  misc_feature (1111)..(1111): n is a, c, g, or t
  misc_feature (1116)..(1116): n is a, c, g, or t
  misc_feature (1121)..(1121): n is a, c, g, or t
  misc_feature (1124)..(1124): n is a, c, g, or t
  misc_feature (1137)..(1137): n is a, c, g, or t
  misc_feature (1154)..(1154): n is a, c, g, or t
  misc_feature (1157)..(1157): n is a, c, g, or t
  misc_feature (1161)..(1161): n is a, c, g, or t
  misc_feature (1204)..(1204): n is a, c, g, or t
  misc_feature (1211)..(1211): n is a, c, g, or t
  misc_feature (1215)..(1215): n is a, c, g, or t
  misc_feature (1218)..(1218): n is a, c, g, or t
  misc_feature (1231)..(1231): n is a, c, g, or t
  misc_feature (1238)..(1238): n is a, c, g, or t
  misc_feature (1242)..(1242): n is a, c, g, or t
  misc_feature (1247)..(1247): n is a, c, g, or t
  misc_feature (1257)..(1257): n is a, c, g, or t
  misc_feature (1266)..(1266): n is a, c, g, or t
  misc_feature (1269)..(1270): n is a, c, g, or t
  misc_feature (1284)..(1284): n is a, c, g, or t
  misc_feature (1299)..(1299): n is a, c, g, or t
  misc_feature (1301)..(1301): n is a, c, g, or t
  misc_feature (1304)..(1304): n is a, c, g, or t
  misc_feature (1306)..(1306): n is a, c, g, or t
  misc_feature (1313)..(1315): n is a, c, g, or t
  misc_feature (1317)..(1317): n is a, c, g, or t
  misc_feature (1325)..(1326): n is a, c, g, or t
  misc_feature (1331)..(1331): n is a, c, g, or t
  misc_feature (1347)..(1347): n is a, c, g, or t
  misc_feature (1351)..(1351): n is a, c, g, or t
  misc_feature (1356)..(1357): n is a, c, g, or t
  misc_feature (1367)..(1367): n is a, c, g, or t
  misc_feature (1371)..(1371): n is a, c, g, or t
  misc_feature (1373)..(1374): n is a, c, g, or t
tagagaaattactatgagaggatcgcatcaccatcaccatcacggatcctatttaggtgacactatagaatcgtcgacccacgcgtccgccagctctgggtacccggctctgcatcgcgtcgccatgatgggccatcgtccagtgctcgtgctcagccagaacacaaagcgtgaatccggaagaaaagttcaatctggaaacatcaatgctgccaagactattgcagatatcatccgaacatgtttgggacccaagtccatgatgaagatgcttttggacccaatgggaggcattgtgatgaccaatgatggcaatgccattcttcgagagattcaagtccagcatccagcggccaagtccatgatcgaaattagccggacccaggatgaagaggttggagatgggaccacatcagtaattattcttgcaggggaaatgctgtctgtagctgagcacttcctggagcagcagatgcacccaacagtggtgatcagtgcttaccgcaaggcattggatgatatgatcagcaccctaaagaaaataagtatcccagtcgacatcagtgacagtgatatgatgctgaacatcatcaacagctctattactaccaaagccatcagtcggtggtcatctttggcttgcaacattgccctggatgctgtcaagatggtacagtttgaggagaatggtcggaaagagattgacataaaaaaatatgcaagagtggaaaagatacctggaggcatcattgaagactcctgtgtcttgcgtggagtcatgattaacaaggatgtgacccatccacgtatgcggcgctatatcaagaaccctcgcattgtgctgctggattcttctctggaatacaagaaaaggagaaagccngactgacattgagattacccgagaggaggacttcncccgaanttctccagatggaggaagantacatccagcagctctgtgaggacattatccnactgaagcccgatgtnggtcatcnctgaaaagggcatctcaaattnacttcaccncnaccttatgcgggnccaanatcnnagccntccccaaantccggaaaananaaaaataatcccattgcttaaaacccgnggggncccgnaantccccccaccaangaactgaaaaaaaaaanttngaanaagaccaggccttttgaaatcaaaaaattggaaaaaaactttnttttttncctnganggaaaaaccccanggcctgncccnttccnccggggggtnaaaaaaaanttnncccaaaaaaaaccnccccccaaacccttnanggntncaagttnnngnaccccccnnggccngggggggcccccaaanggtngcccnncttaaaaaanccgncnntg

SEQ ID NO: 517 - DNA, 1344 bp, Homo Sapiens
  misc_feature (3)..(3): n is a, c, g, or t
  misc_feature (881)..(881): n is a, c, g, or t
  misc_feature (970)..(970): n is a, c, g, or t
  misc_feature (987)..(987): n is a, c, g, or t
  misc_feature (1001)..(1001): n is a, c, g, or t
  misc_feature (1003)..(1003): n is a, c, g, or t
  misc_feature (1008)..(1008): n is a, c, g, or t
  misc_feature (1012)..(1012): n is a, c, g, or t
  misc_feature (1020)..(1020): n is a, c, g, or t
  misc_feature (1031)..(1031): n is a, c, g, or t
  misc_feature (1037)..(1037): n is a, c, g, or t
  misc_feature (1056)..(1056): n is a, c, g, or t
  misc_feature (1062)..(1062): n is a, c, g, or t
  misc_feature (1065)..(1065): n is a, c, g, or t
  misc_feature (1090)..(1090): n is a, c, g, or t
  misc_feature (1094)..(1094): n is a, c, g, or t
  misc_feature (1110)..(1110): n is a, c, g, or t
  misc_feature (1133)..(1133): n is a, c, g, or t
  misc_feature (1143)..(1143): n is a, c, g, or t
  misc_feature (1151)..(1151): n is a, c, g, or t
  misc_feature (1162)..(1162): n is a, c, g, or t
  misc_feature (1181)..(1181): n is a, c, g, or t
  misc_feature (1186)..(1186): n is a, c, g, or t
  misc_feature (1190)..(1190): n is a, c, g, or t
  misc_feature (1193)..(1193): n is a, c, g, or t
  misc_feature (1198)..(1198): n is a, c, g, or t
  misc_feature (1201)..(1201): n is a, c, g, or t
  misc_feature (1207)..(1207): n is a, c, g, or t
  misc_feature (1212)..(1213): n is a, c, g, or t
  misc_feature (1218)..(1218): n is a, c, g, or t
  misc_feature (1221)..(1221): n is a, c, g, or t
  misc_feature (1224)..(1224): n is a, c, g, or t
  misc_feature (1229)..(1229): n is a, c, g, or t
  misc_feature (1232)..(1232): n is a, c, g, or t
  misc_feature (1252)..(1252): n is a, c, g, or t
  misc_feature (1262)..(1262): n is a, c, g, or t
  misc_feature (1266)..(1266): n is a, c, g, or t
  misc_feature (1269)..(1269): n is a, c, g, or t
  misc_feature (1281)..(1281): n is a, c, g, or t
  misc_feature (1284)..(1284): n is a, c, g, or t
  misc_feature (1299)..(1299): n is a, c, g, or t
  misc_feature (1306)..(1306): n is a, c, g, or t
  misc_feature (1308)..(1309): n is a, c, g, or t
  misc_feature (1313)..(1313): n is a, c, g, or t
  misc_feature (1316)..(1317): n is a, c, g, or t
  misc_feature (1326)..(1326): n is a, c, g, or t
  misc_feature (1337)..(1340): n is a, c, g, or t
  misc_feature (1343)..(1343): n is a, c, g, or t
atngagaaattactatgagaggatcgcatcaccatcaccatcacggatcctatttaggtgacactatagaatcgtcgacccacgcgtccggcggggagctggagccagagcggctaccccgaaagctgcgggccgagcttgaggccgcgctggggaagaagcacaagggcggtgatagctccagtggcccccaacgcttggtttctttccgtctcatccgggatctgcaccagcatctgagagaaagggattccaaactatacctccatgagctcctagaaggcagtgaaatctatctcccagaggttgtgaagcctccacggaacccagaactagttgcccggctggagaagattaagatacagctggccaatgaggaatataaacggatcacccgcaacgtcacttgtcaggatacaagacatggtgggactctcagcgacctgggaaagcaagtgagatcattgaaggctctggtcatcaccatcttcaatttcattgtcacggtggttgctgccttcgtctgcacttaccttggaagccaatatatcttcacagaaatggcctcgcgggtgctagctgcattaatcgtcgcctctgtggtgggtctggccgagctgtatgtcatggtgcgggcaatggaaggcgagctgggagaactgtaactggtgcttcatcatcaagtctagagaagactttgggggcttcaggctccaattggcagtcaccgactcagtcaacccatcagactttttgtattcagctccagttagtcagaagaccagcccaggccagctgctgtttctgtggggagccctaatcttctgtgaatttccaaagggagcattggaggagattgagataacacatctttaaaacanaaagaactggtcttggtctatcagtacctcttcctgaatctggtacccatctgccttctccagttcattctaaacactgctgggactanggtttttccatcaggancaatggaatccagncnttccnaaantaaaccanactgccttganttgtcntatgtacaactgatcccanctttcncanaatttttatgcaaactggaattganttcnaaacctccaaaaaaanaaaaggatcccctttcccatttnggctggaaangactgatnaaaacttcaanaaaaaaaatggtttctaangatgnaaantgnaacangcncctccnttttnnaaaanaanggnttagnccntttccaaaaaaaaaaacccnaaaataaggncccnggncctttttttaangancaaaacccatttttnaaatttnannttanttnnaaaataaangggggaaaaannnnaanc

SEQ ID NO: 518 - DNA, 1391 bp, Homo Sapiens
  misc_feature (713)..(713): n is a, c, g, or t
  misc_feature (731)..(731): n is a, c, g, or t
  misc_feature (766)..(766): n is a, c, g, or t
  misc_feature (787)..(787): n is a, c, g, or t
  misc_feature (801)..(801): n is a, c, g, or t
  misc_feature (824)..(824): n is a, c, g, or t
  misc_feature (841)..(841): n is a, c, g, or t
  misc_feature (853)..(853): n is a, c, g, or t
  misc_feature (862)..(863): n is a, c, g, or t
  misc_feature (869)..(869): n is a, c, g, or t
  misc_feature (873)..(873): n is a, c, g, or t
  misc_feature (885)..(885): n is a, c, g, or t
  misc_feature (894)..(895): n is a, c, g, or t
  misc_feature (906)..(908): n is a, c, g, or t
  misc_feature (915)..(916): n is a, c, g, or t
  misc_feature (921)..(922): n is a, c, g, or t
  misc_feature (924)..(924): n is a, c, g, or t
  misc_feature (927)..(927): n is a, c, g, or t
  misc_feature (930)..(934): n is a, c, g, or t
  misc_feature (936)..(948): n is a, c, g, or t
  misc_feature (950)..(955): n is a, c, g, or t
  misc_feature (959)..(980): n is a, c, g, or t
  misc_feature (982)..(990): n is a, c, g, or t
  misc_feature (992)..(992): n is a, c, g, or t
  misc_feature (995)..(1016): n is a, c, g, or t
  misc_feature (1018)..(1031): n is a, c, g, or t
  misc_feature (1033)..(1037): n is a, c, g, or t
  misc_feature (1039)..(1058): n is a, c, g, or t
  misc_feature (1060)..(1124): n is a, c, g, or t
  misc_feature (1126)..(1391): n is a, c, g, or t
agaaattactatgagaggatcgcatcaccatcaccatcacggatcctatttaggtgacactatagaatcgtcgacccacgcgtccggctgccaactctcgcactctgttcttccgccgctccgccgtcgcgtttctctgccggtcgcaatggaagaagagatcgccgcgctggtcattgacaatggctccggcatgtgcaaagctggttttgctggggacgacgctccccgagccgtgtttccttccatcgtcgggcgccccagacaccagggcgtcatggtgggcatgggccagaaggactcctacgtgggcgacgaggcccagagcaagcgtggcatcctgaccctgaagtaccccattgagcatggcatcgtcaccaactgggacgacatggagaagatctggcaccacaccttctacaacgagctgcgcgtggccccggaggagcacccagtgctgctgaccgaggcccccctgaaccccaaggccaacagagagaagatgactcaggtgaggctcggcagacgcccgtgctcctcccgtcctttccccagtcattttctgcccggcttgatttctgacatttaagtgtttctttcgctgttccaggctctgttcctctcccggcatttcctccctgaagcctccaggtttctcatttggtttctgcctgcgttcttttcttttctccacacatcacactggcatgcancatgttgtggcgtgtgancatggggtggccgtgggtctctgtccctgactaanccgccccttgtcccttctcanattatgtttgaaancttcaacaccccggccatgtacntggccatccagccgtgntgtccctctacncctctgggnncaccantggnattgtcatggantctggaaanngggtcacccannnggtgccnntctannanggntannnnntnnnnnnnnnnnnntnnnnnnggannnnnnnnnnnnnnnnnnnnnnannnnnnnnnanatnnnnnnnnnnnnnnnnnnnnnntnnnnnnnnnnnnnnannnnnannnnnnnnnnnnnnnnnnnnannnnnnnnnnnnnnnnnnnnnnnnnnnnnnnnnnnnnnnnnnnnnnnnnnnnnnnnnnnnnnnnnannnnnnnnnnnnnnnnnnnnnnnnnnnnnnnnnnnnnnnnnnnnnnnnnnnnnnnnnnnnnnnnnnnnnnnnnnnnnnnnnnnnnnnnnnnnnnnnnnnnnnnnnnnnnnnnnnnnnnnnnnnnnnnnnnnnnnnnnnnnnnnnnnnnnnnnnnnnnnnnnnnnnnnnnnnnnnnnnnnnnnnnnnnnnnnnnnnnnnnnnnnnnnnnnnnnnnnnnnnnnnnnnnnnnnnnnnnnnnnnnnnnnnnnnnnnnnnnnnnnnnnnnn

SEQ ID NO: 519 - DNA, 1193 bp, Homo Sapiens
  misc_feature (2)..(2): n is a, c, g, or t
  misc_feature (869)..(869): n is a, c, g, or t
  misc_feature (871)..(871): n is a, c, g, or t
  misc_feature (885)..(886): n is a, c, g, or t
  misc_feature (914)..(914): n is a, c, g, or t
  misc_feature (941)..(941): n is a, c, g, or t
  misc_feature (957)..(957): n is a, c, g, or t
  misc_feature (964)..(964): n is a, c, g, or t
  misc_feature (996)..(996): n is a, c, g, or t
  misc_feature (999)..(999): n is a, c, g, or t
  misc_feature (1006)..(1006): n is a, c, g, or t
  misc_feature (1009)..(1009): n is a, c, g, or t
  misc_feature (1019)..(1019): n is a, c, g, or t
  misc_feature (1024)..(1024): n is a, c, g, or t
  misc_feature (1029)..(1029): n is a, c, g, or t
  misc_feature (1043)..(1043): n is a, c, g, or t
  misc_feature (1055)..(1056): n is a, c, g, or t
  misc_feature (1082)..(1082): n is a, c, g, or t
  misc_feature (1098)..(1100): n is a, c, g, or t
  misc_feature (1109)..(1109): n is a, c, g, or t
  misc_feature (1117)..(1118): n is a, c, g, or t
  misc_feature (1138)..(1138): n is a, c, g, or t
  misc_feature (1141)..(1141): n is a, c, g, or t
  misc_feature (1166)..(1169): n is a, c, g, or t
  misc_feature (1171)..(1171): n is a, c, g, or t
  misc_feature (1175)..(1177): n is a, c, g, or t
  misc_feature (1182)..(1182): n is a, c, g, or t
  misc_feature (1187)..(1187): n is a, c, g, or t
  misc_feature (1189)..(1189): n is a, c, g, or t
antagagaaattactatgagaggatcgcatcaccatcaccatcacggatcctatttaggtgacactatagaatcgtcgacccacgcgtccgcagggagcgagcggggcgcccggcagcgcggagtcagcgccgcgggggccgcacccgactcgcgcctggacactcgcggggcgccgacctggcagggggccaaaccagtgctcctgccacctctctggctgccccctagagcctgcccatcccagcctgaccaatgtccacagccagggagcagccaatcttcagcacacgggcgcacgtgttccaaattgacccagccaccaagcgaaactggatcccagcgggcaagcacgcactcactgtctcctatttctacgatgccacccgcaatgtgtaccgcatcatcagcatcggaggcgccaaggccatcatcaacagcactgtcactcccaacatgaccttcaccaaaacttcccagaagttcgggcagtgggccgacagtcgcgccaacacagtctatggcctgggctttgcctctgaacagcatctgacacagtttgccgagaagttccaggaagtgaaggaagcagccaggctggccagggagaaatctcaggatggcggggagctcaccagtccagccctggggctcgcctcccaccaggtgcccccgagccctctcgtcagtgccaacggccccggcgaggaaaaactgttccgcagccagagcgctgatgcccccggccccacagagcgcgagcggctaaagaagatgttgtctgagggctccgtgggcgaggtacagtgggaggccgagtttttcgcactgcaggacagcaacaacaagctggcaggcgccctgcgagangncaacgccgccgcannccagtggaggcagcagctggaggctcancgtgcaaaggccgaacggctgcggcancgggtggctgaactgnagctcangcagcttcaaagtgacccccaccggtgaaaanganggctggncanggcaattccntgaanactgnaacttggtgcaacnaggacagaaatnnaacctgaaaatcaatgggggcccccnagcctgaagctgccannntgagaatcncaaaagtnngactgaaaccccatggaatnganacactgggcaagaaccacctgaaannnngnaaannnaacgncccgntnaatg

SEQ ID NO: 520 - DNA, 1200 bp, Homo Sapiens
  misc_feature (795)..(796): n is a, c, g, or t
  misc_feature (808)..(808): n is a, c, g, or t
  misc_feature (810)..(810): n is a, c, g, or t
  misc_feature (813)..(817): n is a, c, g, or t
  misc_feature (819)..(819): n is a, c, g, or t
  misc_feature (821)..(822): n is a, c, g, or t
  misc_feature (825)..(825): n is a, c, g, or t
  misc_feature (828)..(829): n is a, c, g, or t
  misc_feature (833)..(834): n is a, c, g, or t
  misc_feature (836)..(836): n is a, c, g, or t
  misc_feature (860)..(860): n is a, c, g, or t
  misc_feature (889)..(889): n is a, c, g, or t
  misc_feature (893)..(893): n is a, c, g, or t
  misc_feature (898)..(898): n is a, c, g, or t
  misc_feature (901)..(901): n is a, c, g, or t
  misc_feature (911)..(911): n is a, c, g, or t
  misc_feature (920)..(920): n is a, c, g, or t
  misc_feature (936)..(936): n is a, c, g, or t
  misc_feature (938)..(938): n is a, c, g, or t
  misc_feature (943)..(943): n is a, c, g, or t
  misc_feature (961)..(961): n is a, c, g, or t
  misc_feature (967)..(967): n is a, c, g, or t
  misc_feature (974)..(975): n is a, c, g, or t
  misc_feature (981)..(982): n is a, c, g, or t
  misc_feature (989)..(989): n is a, c, g, or t
  misc_feature (1008)..(1008): n is a, c, g, or t
  misc_feature (1012)..(1012): n is a, c, g, or t
  misc_feature (1021)..(1021): n is a, c, g, or t
  misc_feature (1023)..(1023): n is a, c, g, or t
  misc_feature (1029)..(1029): n is a, c, g, or t
  misc_feature (1039)..(1039): n is a, c, g, or t
  misc_feature (1041)..(1041): n is a, c, g, or t
  misc_feature (1048)..(1048): n is a, c, g, or t
  misc_feature (1063)..(1065): n is a, c, g, or t
  misc_feature (1073)..(1073): n is a, c, g, or t
  misc_feature (1080)..(1080): n is a, c, g, or t
  misc_feature (1084)..(1084): n is a, c, g, or t
  misc_feature (1087)..(1088): n is a, c, g, or t
  misc_feature (1091)..(1091): n is a, c, g, or t
  misc_feature (1105)..(1105): n is a, c, g, or t
  misc_feature (1121)..(1121): n is a, c, g, or t
  misc_feature (1130)..(1131): n is a, c, g, or t
  misc_feature (1134)..(1134): n is a, c, g, or t
  misc_feature (1138)..(1138): n is a, c, g, or t
  misc_feature (1140)..(1140): n is a, c, g, or t
  misc_feature (1146)..(1148): n is a, c, g, or t
  misc_feature (1153)..(1153): n is a, c, g, or t
  misc_feature (1162)..(1162): n is a, c, g, or t
  misc_feature (1165)..(1165): n is a, c, g, or t
  misc_feature (1168)..(1168): n is a, c, g, or t
  misc_feature (1170)..(1170): n is a, c, g, or t
  misc_feature (1172)..(1172): n is a, c, g, or t
  misc_feature (1178)..(1178): n is a, c, g, or t
  misc_feature (1183)..(1184): n is a, c, g, or t
  misc_feature (1193)..(1193): n is a, c, g, or t
  misc_feature (1196)..(1196): n is a, c, g, or t
tagagaaattaactatgagaggatcgcatcaccattcaccatcacggatcctatttaggtgacactatagaatcgtcgacccacgcgtccgcccacgcgtccgccagctgcccaccctctggacattcacccagccaggtggtctcgtcacctcagaggctccgccagactcctgcccaggccaggactgaggcaagcctcaaggcacttctaggacctgcctcttctcaccaagatgaactcactggtttcttggcagctactgcttttcctctgtgccacccactttggggagccattagaaaaggtggcctctgtggggaattctagacccacaggccagcagctagaatccctgggcctcctggcccccggggagcagagcctgccgtgcaccgagaggaagccagctgctactgccaggctgagccgtcgggggacctcgctgtccccgccccccgagagctccgggagcccccagcagccgggcctgtccgccccccacagccgccagatccccgcaccccagggcgcggtgctggtgcagcgggagaaggacctgccgaactacaactggaactccttcggcctgcgcttcggcaagcgggaggcggcaccagggaaccacggcagaagcgctgggcggggctgagggcgcaggtgcggggcagtgaacttcagaccccaaaggagtcagagcatgcggggcgggggcggggggcggggacgtagggctaagggagggggcgctggagcttccaacccgaggcaataaaagaaatgttgcgtaactcnnaaaaaaaaaaananaannnnnanannaanaannttanntnaaaagggcgggccgcttcccttanagtgaagtcgtaattaaacttaaattaantgancttgnaantcctgttganaaaatccanttaatgacctcaaaantncctcntggaatttgtttaaaaancctcgntttgccnnccgggnnttttttnttggggaaaaatccaaacntagnttggggaananttttcnggagctaagnancttaaantggaaaaaaaaaatnnntggaaaanacccccntttnaannttnccattgggattctnaaaaaaaatttttganggattttannccntttngnccaagnnnccttnaaacaaaancgnttnangnaaattnaggcnnttttaaaancgnaaaa

SEQ ID NO: 521 - DNA, 1200 bp, Homo Sapiens
  misc_feature (803)..(803): n is a, c, g, or t
  misc_feature (806)..(806): n is a, c, g, or t
  misc_feature (824)..(824): n is a, c, g, or t
  misc_feature (864)..(864): n is a, c, g, or t
  misc_feature (874)..(874): n is a, c, g, or t
  misc_feature (886)..(886): n is a, c, g, or t
  misc_feature (889)..(889): n is a, c, g, or t
  misc_feature (894)..(895): n is a, c, g, or t
  misc_feature (901)..(901): n is a, c, g, or t
  misc_feature (914)..(914): n is a, c, g, or t
  misc_feature (917)..(917): n is a, c, g, or t
  misc_feature (960)..(960): n is a, c, g, or t
  misc_feature (973)..(974): n is a, c, g, or t
  misc_feature (988)..(990): n is a, c, g, or t
  misc_feature (993)..(993): n is a, c, g, or t
  misc_feature (997)..(997): n is a, c, g, or t
  misc_feature (1004)..(1005): n is a, c, g, or t
  misc_feature (1014)..(1014): n is a, c, g, or t
  misc_feature (1027)..(1028): n is a, c, g, or t
  misc_feature (1030)..(1030): n is a, c, g, or t
  misc_feature (1032)..(1032): n is a, c, g, or t
  misc_feature (1040)..(1040): n is a, c, g, or t
  misc_feature (1045)..(1045): n is a, c, g, or t
  misc_feature (1052)..(1052): n is a, c, g, or t
  misc_feature (1055)..(1056): n is a, c, g, or t
  misc_feature (1059)..(1059): n is a, c, g, or t
  misc_feature (1061)..(1061): n is a, c, g, or t
  misc_feature (1063)..(1063): n is a, c, g, or t
  misc_feature (1066)..(1068): n is a, c, g, or t
  misc_feature (1072)..(1072): n is a, c, g, or t
  misc_feature (1083)..(1083): n is a, c, g, or t
  misc_feature (1085)..(1087): n is a, c, g, or t
  misc_feature (1091)..(1091): n is a, c, g, or t
  misc_feature (1099)..(1099): n is a, c, g, or t
  misc_feature (1101)..(1102): n is a, c, g, or t
  misc_feature (1104)..(1104): n is a, c, g, or t
  misc_feature (1109)..(1109): n is a, c, g, or t
  misc_feature (1112)..(1116): n is a, c, g, or t
  misc_feature (1124)..(1124): n is a, c, g, or t
  misc_feature (1127)..(1127): n is a, c, g, or t
  misc_feature (1132)..(1132): n is a, c, g, or t
  misc_feature (1140)..(1141): n is a, c, g, or t
  misc_feature (1144)..(1144): n is a, c, g, or t
  misc_feature (1147)..(1147): n is a, c, g, or t
  misc_feature (1152)..(1152): n is a, c, g, or t
  misc_feature (1156)..(1156): n is a, c, g, or t
  misc_feature (1164)..(1164): n is a, c, g, or t
  misc_feature (1166)..(1166): n is a, c, g, or t
  misc_feature (1169)..(1169): n is a, c, g, or t
  misc_feature (1174)..(1174): n is a, c, g, or t
  misc_feature (1176)..(1177): n is a, c, g, or t
  misc_feature (1183)..(1183): n is a, c, g, or t
  misc_feature (1189)..(1190): n is a, c, g, or t
  misc_feature (1193)..(1195): n is a, c, g, or t
  misc_feature (1197)..(1197): n is a, c, g, or t
aatagagaaattactatgagaggatcgcatcaccatcaccatcacggatcctatttaggtgacactatagaatcgtcgacccacgcgtccggctatgtacgccctcttcctcctggccagcctcctgggcgcggctctagccggcccggtccttggactgaaagaatgcaccaggggctcggcagtgtggtgccagaatgtgaagacggcgtccgactgcggggcagtgaagcactgcctgcagaccgtttggaacaagccaacagtgaaatcccttccctgcgacatatgcaaagacgttgtcaccgcagctggtgatatgctgaaggacaatgccactgaggaggagatccttgtttacttggagaagacctgtgactggcttccgaaaccgaacatgtctgcttcatgcaaggagatagtggactcctacctccctgtcatcctggacatcattaaaggataatggggacgtttgccaggactgcattcagatggtgactgacatccagactgctgtacggaccaactccacctttgtccaggccttggtggaacatgtcaaggaggagtgtgaccgcctgggccctggcatggccgacatatgcaagaactatatcagccagtattctgaaattgctatccagatgatgatgcacatgcaggatcagcaacccaaggagatctgtgcgctggttgggttctgtgatgaggtgaaagagatgcccatgcagactctggtccccgccaaagtggcctccaagaatgtcatccctgccctggaactggtggagcccattaanaancacgaggtcccagcaaantctgatgtttactgtgaggtgtgtgaaattcctggtgaangaggtgaccnagctgattgacnacnaccannactganaaaaaaatactcnacnctttttaaaaaatgtgctccaaaactgcccaaaatccctgtcngaaaaaatgccannaagggggtggaaannntangggnaacttcnnttttgtccntcctggctggaannangnccaccccntgaantgggggnggnnaanangnttnnncctnttgctttgggnannngggntgccctgncnntnaaccnttnnnnngaactcanccnaaagnaagggggnnttnttncaaantggncaaaaaancnggnggggntnnttttgnattccnnccnnngnaaa

SEQ ID NO: 522 - DNA, 1200 bp, Homo Sapiens
  misc_feature (717)..(717): n is a, c, g, or t
  misc_feature (915)..(915): n is a, c, g, or t
  misc_feature (918)..(918): n is a, c, g, or t
  misc_feature (937)..(937): n is a, c, g, or t
  misc_feature (961)..(961): n is a, c, g, or t
  misc_feature (969)..(969): n is a, c, g, or t
  misc_feature (975)..(975): n is a, c, g, or t
  misc_feature (987)..(987): n is a, c, g, or t
  misc_feature (992)..(992): n is a, c, g, or t
  misc_feature (1038)..(1038): n is a, c, g, or t
  misc_feature (1055)..(1056): n is a, c, g, or t
  misc_feature (1061)..(1061): n is a, c, g, or t
  misc_feature (1069)..(1069): n is a, c, g, or t
  misc_feature (1080)..(1080): n is a, c, g, or t
  misc_feature (1088)..(1088): n is a, c, g, or t
  misc_feature (1105)..(1105): n is a, c, g, or t
  misc_feature (1112)..(1112): n is a, c, g, or t
  misc_feature (1114)..(1114): n is a, c, g, or t
  misc_feature (1121)..(1121): n is a, c, g, or t
  misc_feature (1123)..(1123): n is a, c, g, or t
  misc_feature (1128)..(1128): n is a, c, g, or t
  misc_feature (1139)..(1140): n is a, c, g, or t
  misc_feature (1147)..(1147): n is a, c, g, or t
  misc_feature (1151)..(1152): n is a, c, g, or t
  misc_feature (1168)..(1168): n is a, c, g, or t
  misc_feature (1170)..(1171): n is a, c, g, or t
  misc_feature (1173)..(1178): n is a, c, g, or t
  misc_feature (1180)..(1181): n is a, c, g, or t
  misc_feature (1183)..(1187): n is a, c, g, or t
  misc_feature (1189)..(1190): n is a, c, g, or t
  misc_feature (1199)..(1199): n is a, c, g, or t
caattagagagaattactatgagaggatcgcatcaccatcaccatcacggatcctatttaggtgacactatagaatcgtcgacccacgcgtccgtggacatcagtgatgaggaggaaggtggagctccaccgccggggtccccgcaggtgctggaggaggacgaggcggagctggagctgcagaagcagctggagaagggacgccggctgcgacagttacagcagctacagcagctgcgagacagtggcgagaaggtggtggagattgtgaagaagctggagtctcgccagcggggctgggaggaggatgaggatcccgagcggaagggggccatcgtgttcaacgccacgtccgagttctgccgcaccttgggggagatccccacctacgggctggctggcaatcgcgaggagcaggaggagctcatggactttgaacgggatgaggagcgctcagccaacggtggctccgaatctgacggggaggagaacatcggctggagcacggtgaacctggacgaggagaagcagcagcaggatttctctgcttcctccaccaccatcctggacgaggaaccgatcgtgaatagggggctggcagctgccctgctcctgtgtcagaacaaagggctgctggagaccacagtgcagaaggtggcccgggtgaaggcccccaacaagtcgctgccctcagccgtgtactgcatcgaggataanatggccatcgatgacaagtacagccggagggaggaataccgaggcttcacacaggacttcaaggagaaggacggctacaaacccgacgttaagatcgaatacgtggatgagacgggccggaaactcacacccaaggaggctttccggcagctgtcgcaccgcttccatggcaagggctcaggcaagatgaaaacagancgncggatgaaaaacctggacnagaagcgctcctgaaaaaaatganctccaacnaacacncccctgggcacngtggnccctgctccaagaaaaacaaaaggctcaaaaaaaccccttaattcntgctcaacggcagcggnnaaaancatgaacnccaaaaccccntccccaantgaaagcgcccttcccnccccggncnttgcctnanctttnatttaaaaaannctccccncctnnttttttaaaaaaaaanannannnnnntnntnnnnntnngggcggccnc

SEQ ID NO: 523 - DNA, 1176 bp, Homo Sapiens
  misc_feature (754)..(754): n is a, c, g, or t
  misc_feature (757)..(757): n is a, c, g, or t
  misc_feature (760)..(760): n is a, c, g, or t
  misc_feature (869)..(869): n is a, c, g, or t
  misc_feature (881)..(881): n is a, c, g, or t
  misc_feature (886)..(886): n is a, c, g, or t
  misc_feature (888)..(888): n is a, c, g, or t
  misc_feature (898)..(898): n is a, c, g, or t
  misc_feature (922)..(922): n is a, c, g, or t
  misc_feature (925)..(925): n is a, c, g, or t
  misc_feature (954)..(954): n is a, c, g, or t
  misc_feature (967)..(967): n is a, c, g, or t
  misc_feature (969)..(969): n is a, c, g, or t
  misc_feature (972)..(972): n is a, c, g, or t
  misc_feature (975)..(975): n is a, c, g, or t
  misc_feature (982)..(982): n is a, c, g, or t
  misc_feature (988)..(988): n is a, c, g, or t
  misc_feature (991)..(991): n is a, c, g, or t
  misc_feature (995)..(995): n is a, c, g, or t
  misc_feature (997)..(997): n is a, c, g, or t
  misc_feature (1006)..(1007): n is a, c, g, or t
  misc_feature (1011)..(1011): n is a, c, g, or t
  misc_feature (1013)..(1013): n is a, c, g, or t
  misc_feature (1027)..(1027): n is a, c, g, or t
  misc_feature (1047)..(1047): n is a, c, g, or t
  misc_feature (1051)..(1051): n is a, c, g, or t
  misc_feature (1062)..(1062): n is a, c, g, or t
  misc_feature (1078)..(1078): n is a, c, g, or t
  misc_feature (1094)..(1094): n is a, c, g, or t
  misc_feature (1098)..(1098): n is a, c, g, or t
  misc_feature (1103)..(1103): n is a, c, g, or t
  misc_feature (1108)..(1108): n is a, c, g, or t
  misc_feature (1117)..(1117): n is a, c, g, or t
  misc_feature (1120)..(1120): n is a, c, g, or t
  misc_feature (1131)..(1131): n is a, c, g, or t
  misc_feature (1138)..(1138): n is a, c, g, or t
  misc_feature (1141)..(1141): n is a, c, g, or t
  misc_feature (1145)..(1145): n is a, c, g, or t
  misc_feature (1161)..(1161): n is a, c, g, or t
  misc_feature (1164)..(1164): n is a, c, g, or t
  misc_feature (1173)..(1173): n is a, c, g, or t
  misc_feature (1175)..(1176): n is a, c, g, or t
tagagaaattactatgagaggatcgcatcaccatcaccatcacggatcctatttaggtgacactatagaatcgtcgacccacgcgtccgcccacgcgtccggtgaactggctacatgctctccccgtgacggggccggagctgggctggggacaccccctggaggtgacgtctgctcctctgattccttcaacgaggacatcgctgcctttgccaagcaggttcgctctgagaggcccctcttctcctccaacccagaactggacaatctgatgatccaggccatccaggtgctgcggttccacctgctggagctggagaaggtccacgacctgtgcgacaacttctgtcaccgctacatcacctgcctcaagggaaagatgcccatcgacctggtcatcgaggatcgggacggcggctgcagggaggacttcgaggactacccagcctcctgccccagcctcccagaccagaataatatgtggattcgagaccatgaggatagtgggtctgtacatttggggaccccaggtccatccagtgggggcctggcctcccagagtggggacaactccagtgaccaaggagacgggctggacaccagcgtggcctctcccagttctggtggagaagatgaggacttggaccaggagcgacggcgaaacaagaagagggggatcttccccaaggtggccaccaacatcatgcgagcctggttgttccagcacctctcgcacccgtacccctcggaggancanaanaaacagctggcgcaggacacggggctcaccatcctgcaagtcaacaactggttcattaacgcccggagacgcatcgtgcaacctatgatcgatcaatccaaccgcacanggcaaggtgcanccttnancccaaaaggncagcccatcgggggctataccganacncaaccacacgtggccgtccggcctccggnatcatggggaatnanttnaanttggaangaaaanggnattntntaaaaaagnntgangncaggaaaaacccancctccgggtgtgaaccccancctnaaacctggctngggttcccgcctgggncctccactttcaggancccncctcnaaggnccctttgtnaangccaacctccnaaggccntgntggnaaagggggcctgaagnccnttcaagggntnn

SEQ ID NO: 524 - DNA, 1200 bp, Homo Sapiens; identical to SEQ ID NO: 91
  misc_feature (730)..(730): n is a, c, g, or t
  misc_feature (834)..(834): n is a, c, g, or t
  misc_feature (865)..(865): n is a, c, g, or t
  misc_feature (870)..(870): n is a, c, g, or t
  misc_feature (872)..(872): n is a, c, g, or t
  misc_feature (875)..(875): n is a, c, g, or t
  misc_feature (878)..(878): n is a, c, g, or t
  misc_feature (902)..(902): n is a, c, g, or t
  misc_feature (909)..(909): n is a, c, g, or t
  misc_feature (911)..(911): n is a, c, g, or t
  misc_feature (918)..(918): n is a, c, g, or t
  misc_feature (924)..(924): n is a, c, g, or t
  misc_feature (936)..(936): n is a, c, g, or t
  misc_feature (939)..(939): n is a, c, g, or t
  misc_feature (942)..(942): n is a, c, g, or t
  misc_feature (948)..(948): n is a, c, g, or t
  misc_feature (954)..(954): n is a, c, g, or t
  misc_feature (957)..(957): n is a, c, g, or t
  misc_feature (962)..(962): n is a, c, g, or t
  misc_feature (967)..(967): n is a, c, g, or t
  misc_feature (969)..(969): n is a, c, g, or t
  misc_feature (971)..(971): n is a, c, g, or t
  misc_feature (976)..(976): n is a, c, g, or t
  misc_feature (980)..(980): n is a, c, g, or t
  misc_feature (987)..(987): n is a, c, g, or t
  misc_feature (992)..(992): n is a, c, g, or t
  misc_feature (999)..(999): n is a, c, g, or t
  misc_feature (1001)..(1001): n is a, c, g, or t
  misc_feature (1006)..(1006): n is a, c, g, or t
  misc_feature (1014)..(1014): n is a, c, g, or t
  misc_feature (1016)..(1016): n is a, c, g, or t
  misc_feature (1022)..(1022): n is a, c, g, or t
  misc_feature (1027)..(1027): n is a, c, g, or t
  misc_feature (1035)..(1035): n is a, c, g, or t
  misc_feature (1037)..(1037): n is a, c, g, or t
  misc_feature (1045)..(1045): n is a, c, g, or t
  misc_feature (1050)..(1050): n is a, c, g, or t
  misc_feature (1054)..(1054): n is a, c, g, or t
  misc_feature (1061)..(1062): n is a, c, g, or t
  misc_feature (1066)..(1066): n is a, c, g, or t
  misc_feature (1076)..(1076): n is a, c, g, or t
  misc_feature (1078)..(1078): n is a, c, g, or t
  misc_feature (1080)..(1080): n is a, c, g, or t
  misc_feature (1083)..(1083): n is a, c, g, or t
  misc_feature (1088)..(1088): n is a, c, g, or t
  misc_feature (1098)..(1098): n is a, c, g, or t
  misc_feature (1100)..(1101): n is a, c, g, or t
  misc_feature (1116)..(1118): n is a, c, g, or t
  misc_feature (1121)..(1121): n is a, c, g, or t
  misc_feature (1123)..(1123): n is a, c, g, or t
  misc_feature (1127)..(1127): n is a, c, g, or t
  misc_feature (1138)..(1138): n is a, c, g, or t
  misc_feature (1146)..(1146): n is a, c, g, or t
  misc_feature (1154)..(1154): n is a, c, g, or t
  misc_feature (1158)..(1158): n is a, c, g, or t
  misc_feature (1163)..(1163): n is a, c, g, or t
  misc_feature (1170)..(1170): n is a, c, g, or t
  misc_feature (1178)..(1179): n is a, c, g, or t
  misc_feature (1181)..(1181): n is a, c, g, or t
  misc_feature (1184)..(1184): n is a, c, g, or t
  misc_feature (1189)..(1190): n is a, c, g, or t
  misc_feature (1196)..(1198): n is a, c, g, or t
  misc_feature (1200)..(1200): n is a, c, g, or t

SEQ ID NO: 525 - DNA, 1200 bp, Homo Sapiens
  misc_feature (1)..(1): n is a, c, g, or t
  misc_feature (902)..(902): n is a, c, g, or t
  misc_feature (921)..(921): n is a, c, g, or t
  misc_feature (924)..(924): n is a, c, g, or t
  misc_feature (928)..(950): n is a, c, g, or t
  misc_feature (954)..(954): n is a, c, g, or t
  misc_feature (971)..(971): n is a, c, g, or t
  misc_feature (980)..(980): n is a, c, g, or t
  misc_feature (993)..(993): n is a, c, g, or t
  misc_feature (995)..(996): n is a, c, g, or t
  misc_feature (1003)..(1003): n is a, c, g, or t
  misc_feature (1010)..(1010): n is a, c, g, or t
  misc_feature (1017)..(1017): n is a, c, g, or t
  misc_feature (1024)..(1025): n is a, c, g, or t
  misc_feature (1035)..(1035): n is a, c, g, or t
  misc_feature (1045)..(1045): n is a, c, g, or t
  misc_feature (1051)..(1051): n is a, c, g, or t
  misc_feature (1060)..(1060): n is a, c, g, or t
  misc_feature (1063)..(1063): n is a, c, g, or t
  misc_feature (1089)..(1089): n is a, c, g, or t
  misc_feature (1094)..(1094): n is a, c, g, or t
  misc_feature (1097)..(1097): n is a, c, g, or t
  misc_feature (1099)..(1099): n is a, c, g, or t
  misc_feature (1105)..(1105): n is a, c, g, or t
  misc_feature (1108)..(1109): n is a, c, g, or t
  misc_feature (1111)..(1111): n is a, c, g, or t
  misc_feature (1113)..(1113): n is a, c, g, or t
  misc_feature (1116)..(1117): n is a, c, g, or t
  misc_feature (1121)..(1121): n is a, c, g, or t
  misc_feature (1129)..(1129): n is a, c, g, or t
  misc_feature (1165)..(1165): n is a, c, g, or t
  misc_feature (1172)..(1172): n is a, c, g, or t
  misc_feature (1175)..(1176): n is a, c, g, or t
  misc_feature (1178)..(1179): n is a, c, g, or t
  misc_feature (1186)..(1186): n is a, c, g, or t
  misc_feature (1190)..(1190): n is a, c, g, or t
  misc_feature (1194)..(1194): n is a, c, g, or t
  misc_feature (1199)..(1199): n is a, c, g, or t
naattagagaaattactatgagaggatcgcatcaccatcaccatcacggatcctatttaggtgacactatagaatcgtcgacccacgcgtccgcccacgcgtccgcccacgcgtccgcccacgcgtccggcgtggggcgcccacaatttgcgcgctctctttctgctgctccccagctctcggatacagccgacaccatgggtttcggagacctgaaaagccctgccggcctccaggtgctcaacgattacctggcggacaagagctacatcgaggggtatgtgccatcacaagcagatgtggcagtatttgaagccgtgtccagcccaccgcctgccgacttgtgtcatgccctacgttggtataatcacatcaagtcttacgaaaaggaaaaggccagcctgccaggagtgaagaaagctttgggcaaatatggtcctgccgatgtggaagacactacaggaagtggagctacagatagtaaagatgatgatgacattgacctctttggatctgatgatgaggaggaaagtgaagaagcaaagaggctaagggaagaacgtcttgcacaatatgaatcaaagaaagccaaaaaacctgcacttgttgccaagtcttccatcttactagatgtgaaaccttgggatgatgagacagatatggcgaaattagaggagtgcgtcagaagcattcaagcagacggcttagtctggggctcatctaaactagttccagtgggatacggaattaagaaacttcaaatacagtgtgtagttgaagatgataaagttggaacagatatgctggaggagcagatcactgcttttgaggactatgtgcagtccatggatgtggctgctttcaacaagatctaaaatccatcctggatcatggcatttaantaaaagattgaaagattanaanaaannnnnnnnnnnnnnnnnnnnnnnaaangggggccgctccctatngggagtcgnattaaccttaatnanntgaactnggactcnggttganaaatccnnaatgaccccnaactccctcnggattnttcaaaacnctnggttgcccccggggtttttttttggngaaantcnanctactnggnnananttnngganctaggganctaaatggaaaaaaaatcctggataccccgttgaanttcccanggnntnnaaaaaantttnaggntttcnc

SEQ ID NO: 526 - DNA, 1200 bp, Homo Sapiens
  misc_feature (1)..(1): n is a, c, g, or t
  misc_feature (3)..(3): n is a, c, g, or t
  misc_feature (922)..(922): n is a, c, g, or t
  misc_feature (929)..(929): n is a, c, g, or t
  misc_feature (933)..(933): n is a, c, g, or t
  misc_feature (935)..(935): n is a, c, g, or t
  misc_feature (946)..(946): n is a, c, g, or t
  misc_feature (948)..(948): n is a, c, g, or t
  misc_feature (950)..(950): n is a, c, g, or t
  misc_feature (971)..(971): n is a, c, g, or t
  misc_feature (981)..(981): n is a, c, g, or t
  misc_feature (995)..(995): n is a, c, g, or t
  misc_feature (1003)..(1003): n is a, c, g, or t
  misc_feature (1011)..(1011): n is a, c, g, or t
  misc_feature (1020)..(1020): n is a, c, g, or t
  misc_feature (1027)..(1027): n is a, c, g, or t
  misc_feature (1033)..(1033): n is a, c, g, or t
  misc_feature (1038)..(1038): n is a, c, g, or t
  misc_feature (1042)..(1043): n is a, c, g, or t
  misc_feature (1051)..(1051): n is a, c, g, or t
  misc_feature (1063)..(1063): n is a, c, g, or t
  misc_feature (1068)..(1068): n is a, c, g, or t
  misc_feature (1084)..(1085): n is a, c, g, or t
  misc_feature (1091)..(1091): n is a, c, g, or t
  misc_feature (1099)..(1099): n is a, c, g, or t
  misc_feature (1108)..(1109): n is a, c, g, or t
  misc_feature (1116)..(1116): n is a, c, g, or t
  misc_feature (1128)..(1128): n is a, c, g, or t
  misc_feature (1140)..(1140): n is a, c, g, or t
  misc_feature (1143)..(1144): n is a, c, g, or t
  misc_feature (1146)..(1146): n is a, c, g, or t
  misc_feature (1150)..(1151): n is a, c, g, or t
  misc_feature (1153)..(1153): n is a, c, g, or t
  misc_feature (1155)..(1155): n is a, c, g, or t
  misc_feature (1171)..(1171): n is a, c, g, or t
  misc_feature (1192)..(1192): n is a, c, g, or t
  misc_feature (1199)..(1199): n is a, c, g, or t
nantagagaaattactatgagaggatcgcatcaccatcaccatcacggatcctatttaggtgacactatagaatcgtcgacccacgcgtccgcccacgcgtccgtgctgcctgaggatgaggacactgaggagtgtgaacacctgaccctggctgagtggtgggaactcctcttcttcatcaagaagctggatggacctgaccatcaggaggttctccagatcctccaggagaacctagatggggagattctggatgatgagatcctagctgaactggccgtgcccatagaattggcccaggacttgctgctgactctgccacagcgactcaatgacagtgccctcagggacctgatcaactgccatgtctacaagaagtatgggcctgaagccctagcagggaaccaagcctacccatcccttctagaagcccaagaagatgtcctcctgctagacgcgcaggcccaggctaaggactcagaagatgcagccaaagtggaagcaaaagaacccccatctcagagtcccaacactcccctgcagcgtctggtggagggttatggtccagctgggaaaatcctcctggatctagagcaagccctcagctcagaggggacccaggagaacaaggtcaagccactcctgctgcagctgcagcggcagccgcagcccttcctggcactgatgcagagcctggacactccggagactaacaggaccctgcacctgactgtgctgagaatcctgaagcagctggtggacttccccgaggcactgctgctcccctggcacgaggccgtggatgcctgcatggcctgcctgcggtccccaaacactgatcgagaggtgctccaggaactgattttcttcctgcaccgcctgacctcagtgagcagggactatgccgtggtgctgaatcanctgggancaananacgctatctcnangncctggaaaacacctgggaaanctggactggntcagaactgcgganatggtgtncaagtgtnaaaacatgnccccctnttacgnaaaantctnnccaaatcntgggaggctgcntccanaggggctgggccaatnnaaaacnaaaaaaanccccggccnncaatccnttttttgagggntcccaaaaccgngcnngncccnntngnaaataaaaaaaaatgntggaaaagggaaggttctccnccccccng

SEQ ID NO: 527 - DNA, 1200 bp, Homo Sapiens
  misc_feature (2)..(2): n is a, c, g, or t
  misc_feature (434)..(434): n is a, c, g, or t
  misc_feature (437)..(437): n is a, c, g, or t
  misc_feature (463)..(463): n is a, c, g, or t
  misc_feature (512)..(512): n is a, c, g, or t
  misc_feature (522)..(522): n is a, c, g, or t
  misc_feature (537)..(537): n is a, c, g, or t
  misc_feature (553)..(553): n is a, c, g, or t
  misc_feature (577)..(577): n is a, c, g, or t
  misc_feature (595)..(595): n is a, c, g, or t
  misc_feature (597)..(597): n is a, c, g, or t
  misc_feature (606)..(606): n is a, c, g, or t
  misc_feature (608)..(608): n is a, c, g, or t
  misc_feature (613)..(613): n is a, c, g, or t
  misc_feature (621)..(621): n is a, c, g, or t
  misc_feature (630)..(630): n is a, c, g, or t
  misc_feature (635)..(636): n is a, c, g, or t
  misc_feature (646)..(646): n is a, c, g, or t
  misc_feature (660)..(660): n is a, c, g, or t
  misc_feature (666)..(667): n is a, c, g, or t
  misc_feature (670)..(672): n is a, c, g, or t
  misc_feature (674)..(674): n is a, c, g, or t
  misc_feature (685)..(685): n is a, c, g, or t
  misc_feature (687)..(687): n is a, c, g, or t
  misc_feature (698)..(698): n is a, c, g, or t
  misc_feature (701)..(701): n is a, c, g, or t
  misc_feature (703)..(703): n is a, c, g, or t
  misc_feature (717)..(717): n is a, c, g, or t
  misc_feature (719)..(719): n is a, c, g, or t
  misc_feature (733)..(733): n is a, c, g, or t
  misc_feature (735)..(735): n is a, c, g, or t
  misc_feature (749)..(749): n is a, c, g, or t
  misc_feature (751)..(751): n is a, c, g, or t
  misc_feature (753)..(753): n is a, c, g, or t
  misc_feature (755)..(755): n is a, c, g, or t
  misc_feature (757)..(757): n is a, c, g, or t
  misc_feature (759)..(759): n is a, c, g, or t
  misc_feature (761)..(761): n is a, c, g, or t
  misc_feature (766)..(766): n is a, c, g, or t
  misc_feature (769)..(769): n is a, c, g, or t
  misc_feature (782)..(782): n is a, c, g, or t
  misc_feature (784)..(785): n is a, c, g, or t
  misc_feature (790)..(790): n is a, c, g, or t
  misc_feature (792)..(792): n is a, c, g, or t
  misc_feature (794)..(794): n is a, c, g, or t
  misc_feature (803)..(805): n is a, c, g, or t
  misc_feature (812)..(815): n is a, c, g, or t
  misc_feature (821)..(821): n is a, c, g, or t
  misc_feature (826)..(826): n is a, c, g, or t
  misc_feature (829)..(829): n is a, c, g, or t
  misc_feature (832)..(832): n is a, c, g, or t
  misc_feature (835)..(835): n is a, c, g, or t
  misc_feature (838)..(840): n is a, c, g, or t
  misc_feature (844)..(845): n is a, c, g, or t
  misc_feature (848)..(848): n is a, c, g, or t
  misc_feature (850)..(851): n is a, c, g, or t
  misc_feature (853)..(853): n is a, c, g, or t
  misc_feature (855)..(855): n is a, c, g, or t
  misc_feature (858)..(858): n is a, c, g, or t
  misc_feature (863)..(863): n is a, c, g, or t
  misc_feature (865)..(865): n is a, c, g, or t
  misc_feature (868)..(868): n is a, c, g, or t
  misc_feature (879)..(880): n is a, c, g, or t
  misc_feature (891)..(891): n is a, c, g, or t
  misc_feature (895)..(895): n is a, c, g, or t
  misc_feature (898)..(899): n is a, c, g, or t
  misc_feature (907)..(907): n is a, c, g, or t
  misc_feature (910)..(910): n is a, c, g, or t
  misc_feature (912)..(912): n is a, c, g, or t
  misc_feature (926)..(926): n is a, c, g, or t
  misc_feature (930)..(930): n is a, c, g, or t
  misc_feature (941)..(941): n is a, c, g, or t
  misc_feature (945)..(945): n is a, c, g, or t
  misc_feature (959)..(959): n is a, c, g, or t
  misc_feature (964)..(964): n is a, c, g, or t
  misc_feature (967)..(967): n is a, c, g, or t
  misc_feature (972)..(972): n is a, c, g, or t
  misc_feature (976)..(978): n is a, c, g, or t
  misc_feature (980)..(980): n is a, c, g, or t
  misc_feature (986)..(986): n is a, c, g, or t
  misc_feature (991)..(991): n is a, c, g, or t
  misc_feature (997)..(997): n is a, c, g, or t
  misc_feature (1001)..(1001): n is a, c, g, or t
  misc_feature (1003)..(1003): n is a, c, g, or t
  misc_feature (1005)..(1005): n is a, c, g, or t
  misc_feature (1016)..(1016): n is a, c, g, or t
  misc_feature (1018)..(1018): n is a, c, g, or t
  misc_feature (1024)..(1031): n is a, c, g, or t
  misc_feature (1040)..(1040): n is a, c, g, or t
  misc_feature (1045)..(1048): n is a, c, g, or t
  misc_feature (1058)..(1058): n is a, c, g, or t
  misc_feature (1065)..(1065): n is a, c, g, or t
  misc_feature (1070)..(1071): n is a, c, g, or t
  misc_feature (1074)..(1074): n is a, c, g, or t
  misc_feature (1076)..(1077): n is a, c, g, or t
  misc_feature (1079)..(1079): n is a, c, g, or t
  misc_feature (1083)..(1083): n is a, c, g, or t
  misc_feature (1088)..(1088): n is a, c, g, or t
  misc_feature (1090)..(1090): n is a, c, g, or t
  misc_feature (1094)..(1095): n is a, c, g, or t
  misc_feature (1100)..(1100): n is a, c, g, or t
  misc_feature (1105)..(1105): n is a, c, g, or t
  misc_feature (1117)..(1117): n is a, c, g, or t
  misc_feature (1119)..(1119): n is a, c, g, or t
  misc_feature (1123)..(1125): n is a, c, g, or t
  misc_feature (1127)..(1127): n is a, c, g, or t
  misc_feature (1143)..(1146): n is a, c, g, or t
  misc_feature (1149)..(1149): n is a, c, g, or t
  misc_feature (1153)..(1153): n is a, c, g, or t
  misc_feature (1156)..(1157): n is a, c, g, or t
  misc_feature (1159)..(1159): n is a, c, g, or t
  misc_feature (1163)..(1163): n is a, c, g, or t
  misc_feature (1166)..(1166): n is a, c, g, or t
  misc_feature (1168)..(1170): n is a, c, g, or t
  misc_feature (1172)..(1173): n is a, c, g, or t
  misc_feature (1177)..(1182): n is a, c, g, or t
  misc_feature (1193)..(1193): n is a, c, g, or t
  misc_feature (1195)..(1195): n is a, c, g, or t
  misc_feature (1199)..(1199): n is a, c, g, or t
antagagaaattactatgagaggatcgcatcaccatcaccatcacgggatcctatttaggtgacactatagaatcgtcgacccacgcgtccgcccacgcgatccgcgcaggaagaactgcgggcgccaggcagcgtggccgagcggcgccgcctgttccagcagaaagcggcctcgctggacgagcgcacgcgtcagcgcagcccggcctcagacctcgagctgcgcttcgcccaggagctgggccgcatccgccgctccacgtcgcgggaggagctggtgcgctcgcacgagtccctgcgcgccacgctgcagcgtgccccatcccctcgagagcccggcgagcccccgctcttctctcggccctccacccccaagacatcgcgggccgtgagccccgccgccgcccagccgccctctccgagcagcgcgganaanccgggggacgagcctgggaggcccangagccgcgggccggcgggcaggacagagccgggggaaggcccgcagcangaggttaggngtcgggaccaattcncgctgacccggagcanagccatccaggagtgcaggagccntgtgccgccccccgccgncnatcccccanangccangacgaaantcacctctncggtnngaagcgtgancccccggcgcaagncgtgcnnttnnngncctgggccacntnctggactgaanggngnttctgtaccccaanantttggaaaaaaaananggcggtggcctgangnananananangcttnccnaaaatttcgtaanannaacgntncntgggggatnnntgggaannnnccaatngggcnctnaantcnaannnaaanngtntnntnanccnggatnanctncccttgaactnnaattttttgantganatnnttaatatnttncnattggaaaaaaaancccnttaaaaggccncctnagttttttaaaatnccccnttnaaaanagtnnntntttgtntacanagggtnaaantntnttaataaaaantntttatnnnnnnnncaaacctcncttcnnnnagttttcttnataatanaattnnttntnntntttnattangngtcnnttttntcttngttttaaagttnanattnnntncttcttttttaggtannnnttnattnaanncnattnatntnnntnnattnnnnnnaaaaattttgnanaatnt

SEQ ID NO: 528 - DNA, 1200 bp, Homo Sapiens
  misc_feature (577)..(577): n is a, c, g, or t
  misc_feature (711)..(711): n is a, c, g, or t
  misc_feature (721)..(721): n is a, c, g, or t
  misc_feature (727)..(727): n is a, c, g, or t
  misc_feature (740)..(740): n is a, c, g, or t
  misc_feature (754)..(754): n is a, c, g, or t
  misc_feature (769)..(769): n is a, c, g, or t
  misc_feature (791)..(791): n is a, c, g, or t
  misc_feature (833)..(833): n is a, c, g, or t
  misc_feature (846)..(846): n is a, c, g, or t
  misc_feature (855)..(855): n is a, c, g, or t
  misc_feature (861)..(863): n is a, c, g, or t
  misc_feature (868)..(868): n is a, c, g, or t
  misc_feature (871)..(871): n is a, c, g, or t
  misc_feature (889)..(889): n is a, c, g, or t
  misc_feature (892)..(892): n is a, c, g, or t
  misc_feature (894)..(894): n is a, c, g, or t
  misc_feature (896)..(896): n is a, c, g, or t
  misc_feature (907)..(907): n is a, c, g, or t
  misc_feature (917)..(917): n is a, c, g, or t
  misc_feature (926)..(926): n is a, c, g, or t
  misc_feature (937)..(937): n is a, c, g, or t
  misc_feature (941)..(941): n is a, c, g, or t
  misc_feature (953)..(954): n is a, c, g, or t
  misc_feature (957)..(958): n is a, c, g, or t
  misc_feature (964)..(964): n is a, c, g, or t
  misc_feature (967)..(967): n is a, c, g, or t
  misc_feature (979)..(979): n is a, c, g, or t
  misc_feature (990)..(991): n is a, c, g, or t
  misc_feature (997)..(998): n is a, c, g, or t
  misc_feature (1000)..(1000): n is a, c, g, or t
  misc_feature (1012)..(1012): n is a, c, g, or t
  misc_feature (1017)..(1017): n is a, c, g, or t
  misc_feature (1019)..(1019): n is a, c, g, or t
  misc_feature (1023)..(1024): n is a, c, g, or t
  misc_feature (1035)..(1035): n is a, c, g, or t
  misc_feature (1037)..(1037): n is a, c, g, or t
  misc_feature (1049)..(1049): n is a, c, g, or t
  misc_feature (1051)..(1052): n is a, c, g, or t
  misc_feature (1055)..(1055): n is a, c, g, or t
  misc_feature (1057)..(1057): n is a, c, g, or t
  misc_feature (1070)..(1071): n is a, c, g, or t
  misc_feature (1084)..(1084): n is a, c, g, or t
  misc_feature (1086)..(1086): n is a, c, g, or t
  misc_feature (1089)..(1089): n is a, c, g, or t
  misc_feature (1092)..(1098): n is a, c, g, or t
  misc_feature (1103)..(1103): n is a, c, g, or t
  misc_feature (1109)..(1109): n is a, c, g, or t
  misc_feature (1121)..(1121): n is a, c, g, or t
  misc_feature (1123)..(1123): n is a, c, g, or t
  misc_feature (1126)..(1126): n is a, c, g, or t
  misc_feature (1133)..(1134): n is a, c, g, or t
  misc_feature (1136)..(1136): n is a, c, g, or t
  misc_feature (1141)..(1141): n is a, c, g, or t
  misc_feature (1151)..(1151): n is a, c, g, or t
  misc_feature (1153)..(1153): n is a, c, g, or t
  misc_feature (1155)..(1156): n is a, c, g, or t
  misc_feature (1161)..(1161): n is a, c, g, or t
  misc_feature (1165)..(1165): n is a, c, g, or t
  misc_feature (1168)..(1168): n is a, c, g, or t
  misc_feature (1170)..(1170): n is a, c, g, or t
  misc_feature (1177)..(1178): n is a, c, g, or t
  misc_feature (1180)..(1180): n is a, c, g, or t
  misc_feature (1195)..(1195): n is a, c, g, or t
aatagagaaaattactatgagaggatcgcatcaccatcaccatcacggatcctatttaggtgacactatagaatcgtcgacccacgcgtccgggcccctgaagttccatctccgagagtggtgtgcagggcaggccagggcccatgctggctgcagtctctgtggctgcctgcctgggccagcctgtttgggagctgggactgtgggctcgccttttcgtacctgggctcaggtgcggtgtggccaccgccaccctcatcccctgcctgggaggctctcccaggggctgatgggggggttctgtgagggagaatcagggctcgggaagccacgcctgggaaggcaggacacaggacacagcagctttctttggaaatctcccaggtgaggattcacatcccaaaataaaattcagaagccaggtggcctgtgctccccatgggtgacctctggaggcagtggaccaagatgcagcaaggagaggatgcagaacagcttcttgcagaagcacctgctccggcatccagcgctgcctggaggcaggaaggagaggcagggcaggacacgctggtctganatgagggggagccccacgggccccaggcaggctagaggaggcacaggccctgccacggccaactcaggtcagccagcctgaggctgtggcctccaaagggtctgggcgcaccccccaagtcgcaggtgtctgangccagccaanctgcanagcactcgcggcntgggttgggctgantggaggtgccctganaacctgccctaaattcaaaaanccctccactgccatggaaaactgcctggctgtgtcctctcanccaggtgccgtgnttggccttngcctannnaccanaanccacactgcagcctccgnccnantnccttctttccnggccttgctntaattgagnaattgcctaanccangaacccaaaaanntcnnaatttnatngtgaaaaagaanccccctgaatnnaggaanncntggccttctttnaaaantncccnntgccaaaaaancnccctaaggaacncnnttnanttccttccttgannctcccaaagaatngnttnccnnnnnnntaaanggaagncttgttttaaantntcncaagggnngnggttnttggaaaaanancnngcccnaagnggntnttctctnncntccaaaggggggaangaaaa

SEQ ID NO: 529 - DNA, 980 bp, Homo Sapiens
  misc_feature (750)..(750): n is a, c, g, or t
  misc_feature (793)..(793): n is a, c, g, or t
  misc_feature (804)..(804): n is a, c, g, or t
  misc_feature (806)..(806): n is a, c, g, or t
  misc_feature (867)..(867): n is a, c, g, or t
  misc_feature (877)..(877): n is a, c, g, or t
  misc_feature (883)..(883): n is a, c, g, or t
  misc_feature (906)..(906): n is a, c, g, or t
  misc_feature (910)..(910): n is a, c, g, or t
  misc_feature (919)..(919): n is a, c, g, or t
  misc_feature (922)..(962): n is a, c, g, or t
  misc_feature (976)..(976): n is a, c, g, or t
atagagaaattactatgagaggatcgcatcaccatcaccatcacggatcctatttaggtgacactatagaatcgtcgacccacgcgtccggatcactgcgaccagaggaaattgaagagctccgagaggccttcagagaattcgacaaggacaaggatggctacatcaactgccgggatctgggcaactgcatgcgcaccatgggctacatgcccaccgagatggagctcatcgaactgtcccagcagatcaacatgaacctgggtggccatgtagattttgatgacttcgtggagctaatggggcctaaactcctggcagagacagcagatatgattggtgtaaaggaactgcgagatgctttccgagagtttgacaccaatggtgatggggaaataagcaccagtgagctgcgagaggctatgaggaagctcctgggtcatcaggtgggacaccgagacatagaggaaattatccgagatgtggacctcaatggggatggacgagtggactttgaagagtttgtccggatgatgtcccgctgaggccgcgagggcccctccaggactgccaagctcccaaaggcggggctaagaggagctagagcctgcctgcaccccggggaggcgcccaccccggacccccacccctccgcactgtgaaagactaactcctgcaactggaaaagcgggggcgcccgccgacgaggaggccaccgtgccaagccggcagaggtcatgccaggcgccnagggccatgtgcccagctgctgctggctgggtgggccagggancccgccagcanancccacacagcatgtccccccccagggcaaagcctcccaccttcgctctgcgcccgtcccanctcgcctcanccctgntatctcaaaaccaataaaaaatntttnccagagccnaannnnnnnnnnnnnnnnnnnnnnnnnnnnnnnnnnnnnnnnnaaaagggccggccncccc

SEQ ID NO: 530 - DNA, 1200 bp, Homo Sapiens
  misc_feature (1)..(1): n is a, c, g, or t
  misc_feature (5)..(5): n is a, c, g, or t
  misc_feature (18)..(19): n is a, c, g, or t
  misc_feature (370)..(370): n is a, c, g, or t
  misc_feature (452)..(452): n is a, c, g, or t
  misc_feature (465)..(465): n is a, c, g, or t
  misc_feature (588)..(588): n is a, c, g, or t
  misc_feature (632)..(632): n is a, c, g, or t
  misc_feature (709)..(709): n is a, c, g, or t
  misc_feature (716)..(716): n is a, c, g, or t
  misc_feature (725)..(725): n is a, c, g, or t
  misc_feature (739)..(739): n is a, c, g, or t
  misc_feature (744)..(744): n is a, c, g, or t
  misc_feature (750)..(751): n is a, c, g, or t
  misc_feature (759)..(759): n is a, c, g, or t
  misc_feature (769)..(770): n is a, c, g, or t
  misc_feature (781)..(781): n is a, c, g, or t
  misc_feature (794)..(794): n is a, c, g, or t
  misc_feature (811)..(811): n is a, c, g, or t
  misc_feature (825)..(825): n is a, c, g, or t
  misc_feature (827)..(827): n is a, c, g, or t
  misc_feature (833)..(833): n is a, c, g, or t
  misc_feature (836)..(836): n is a, c, g, or t
  misc_feature (849)..(849): n is a, c, g, or t
  misc_feature (855)..(855): n is a, c, g, or t
  misc_feature (858)..(858): n is a, c, g, or t
  misc_feature (864)..(865): n is a, c, g, or t
  misc_feature (869)..(869): n is a, c, g, or t
  misc_feature (872)..(872): n is a, c, g, or t
  misc_feature (876)..(876): n is a, c, g, or t
  misc_feature (881)..(882): n is a, c, g, or t
  misc_feature (885)..(885): n is a, c, g, or t
  misc_feature (887)..(891): n is a, c, g, or t
  misc_feature (904)..(905): n is a, c, g, or t
  misc_feature (915)..(915): n is a, c, g, or t
  misc_feature (920)..(920): n is a, c, g, or t
  misc_feature (923)..(923): n is a, c, g, or t
  misc_feature (925)..(925): n is a, c, g, or t
  misc_feature (927)..(927): n is a, c, g, or t
  misc_feature (931)..(931): n is a, c, g, or t
  misc_feature (935)..(935): n is a, c, g, or t
  misc_feature (938)..(938): n is a, c, g, or t
  misc_feature (940)..(942): n is a, c, g, or t
  misc_feature (951)..(952): n is a, c, g, or t
  misc_feature (954)..(954): n is a, c, g, or t
  misc_feature (958)..(958): n is a, c, g, or t
  misc_feature (966)..(967): n is a, c, g, or t
  misc_feature (969)..(969): n is a, c, g, or t
  misc_feature (979)..(979): n is a, c, g, or t
  misc_feature (992)..(992): n is a, c, g, or t
  misc_feature (995)..(995): n is a, c, g, or t
  misc_feature (1012)..(1012): n is a, c, g, or t
  misc_feature (1016)..(1016): n is a, c, g, or t
  misc_feature (1019)..(1019): n is a, c, g, or t
  misc_feature (1021)..(1022): n is a, c, g, or t
  misc_feature (1026)..(1026): n is a, c, g, or t
  misc_feature (1028)..(1029): n is a, c, g, or t
  misc_feature (1034)..(1034): n is a, c, g, or t
  misc_feature (1043)..(1043): n is a, c, g, or t
  misc_feature (1045)..(1046): n is a, c, g, or t
  misc_feature (1048)..(1048): n is a, c, g, or t
  misc_feature (1053)..(1053): n is a, c, g, or t
  misc_feature (1056)..(1057): n is a, c, g, or t
  misc_feature (1072)..(1072): n is a, c, g, or t
  misc_feature (1075)..(1075): n is a, c, g, or t
  misc_feature (1082)..(1084): n is a, c, g, or t
  misc_feature (1087)..(1087): n is a, c, g, or t
  misc_feature (1094)..(1094): n is a, c, g, or t
  misc_feature (1103)..(1103): n is a, c, g, or t
  misc_feature (1107)..(1108): n is a, c, g, or t
  misc_feature (1115)..(1115): n is a, c, g, or t
  misc_feature (1129)..(1129): n is a, c, g, or t
  misc_feature (1131)..(1131): n is a, c, g, or t
  misc_feature (1136)..(1136): n is a, c, g, or t
  misc_feature (1147)..(1147): n is a, c, g, or t
  misc_feature (1163)..(1163): n is a, c, g, or t
  misc_feature (1174)..(1174): n is a, c, g, or t
  misc_feature (1178)..(1178): n is a, c, g, or t
  misc_feature (1181)..(1181): n is a, c, g, or t
  misc_feature (1185)..(1186): n is a, c, g, or t
  misc_feature (1196)..(1196): n is a, c, g, or t
naaanagagaaaattacnnatgagaggatcgcatcaccctcaccatcagggatcctatttaggtgacactatagaatcgtcgacccacgcgtccggaagccctgaaggagcaggaggagatcaacttccggctgaggcagtacatggacaagattatcctcgccatcctggaccacaatccctccatcctcgagatcaaacactaaggcacggggctggctgcagagcagccttaggaccctgggaccaagggcagaccctgcccaaggatgcaggcctaagccgggcctcacactcacactgtaaatgtctctctggccaccatgcgttacgtgtacccgtgtatatgtggggaggctgtgcacacgancgaggggtgagtggccgtggctgtgggcagcatccacacggttagccgtgcatgcactttgtggcccctttgcaaggggcanagggtactggaantgggaggaggcaaggtctgctatcaggagttactgtaaaaacaagaactggaagctcgtgtttccggtactgggtaaaatgattctacctctggggataaggattcacattcgctctagtacnatgggctctttcaccccactcctagtcccttgggagtgggagcnaaaattgtgatctttcctaggagttttgaatgcccccatatttgtgtcctcgccaactctttggccaccttttcaangccccantgtttcaancttcaaaaagggangaaanggggcnntctggaanggttcccatnnaaaatgggggnccctccaccaaantgccttggctcaccggnccaaacaaaccctntnttaatngtngtgtgtcccaaantgaaanatnaagaanntctnggntttncatannccnannnnntgcgggggccatnntcctctccangtaanctnananaaanttcngtncnnntcccccccnncncatngctaaccnnancctccccccngatttctggtttncantttttaaagaaaaaatnaaanccnanntttntnncggcnctccttttntnnanatttnaannggataaaaaattttnatncaaaaannngangtttttnggaaatggntttnnctaaganccaaaagttttaantntccgnccactcctacntaaatatatttttttnggaaaaaaaanaaanttnccanntcccgatacntatt

SEQ ID NO: 531 - DNA, 1200 bp, Homo Sapiens
  misc_feature (1)..(1): n is a, c, g, or t
  misc_feature (513)..(514): n is a, c, g, or t
  misc_feature (517)..(517): n is a, c, g, or t
  misc_feature (523)..(523): n is a, c, g, or t
  misc_feature (529)..(529): n is a, c, g, or t
  misc_feature (540)..(542): n is a, c, g, or t
  misc_feature (544)..(544): n is a, c, g, or t
  misc_feature (549)..(550): n is a, c, g, or t
  misc_feature (552)..(553): n is a, c, g, or t
  misc_feature (555)..(560): n is a, c, g, or t
  misc_feature (562)..(569): n is a, c, g, or t
  misc_feature (571)..(576): n is a, c, g, or t
  misc_feature (578)..(579): n is a, c, g, or t
  misc_feature (581)..(583): n is a, c, g, or t
  misc_feature (585)..(591): n is a, c, g, or t
  misc_feature (597)..(597): n is a, c, g, or t
  misc_feature (599)..(599): n is a, c, g, or t
  misc_feature (613)..(613): n is a, c, g, or t
  misc_feature (615)..(615): n is a, c, g, or t
  misc_feature (619)..(620): n is a, c, g, or t
  misc_feature (631)..(631): n is a, c, g, or t
  misc_feature (643)..(643): n is a, c, g, or t
  misc_feature (645)..(646): n is a, c, g, or t
  misc_feature (651)..(652): n is a, c, g, or t
  misc_feature (661)..(661): n is a, c, g, or t
  misc_feature (664)..(664): n is a, c, g, or t
  misc_feature (681)..(681): n is a, c, g, or t
  misc_feature (684)..(685): n is a, c, g, or t
  misc_feature (705)..(705): n is a, c, g, or t
  misc_feature (720)..(721): n is a, c, g, or t
  misc_feature (728)..(728): n is a, c, g, or t
  misc_feature (732)..(733): n is a, c, g, or t
  misc_feature (739)..(739): n is a, c, g, or t
  misc_feature (743)..(743): n is a, c, g, or t
  misc_feature (764)..(764): n is a, c, g, or t
  misc_feature (768)..(768): n is a, c, g, or t
  misc_feature (774)..(774): n is a, c, g, or t
  misc_feature (795)..(795): n is a, c, g, or t
  misc_feature (806)..(806): n is a, c, g, or t
  misc_feature (827)..(827): n is a, c, g, or t
  misc_feature (831)..(831): n is a, c, g, or t
  misc_feature (841)..(841): n is a, c, g, or t
  misc_feature (843)..(843): n is a, c, g, or t
  misc_feature (854)..(854): n is a, c, g, or t
  misc_feature (859)..(860): n is a, c, g, or t
  misc_feature (864)..(864): n is a, c, g, or t
  misc_feature (868)..(868): n is a, c, g, or t
  misc_feature (872)..(872): n is a, c, g, or t
  misc_feature (875)..(875): n is a, c, g, or t
  misc_feature (877)..(877): n is a, c, g, or t
  misc_feature (882)..(882): n is a, c, g, or t
  misc_feature (894)..(894): n is a, c, g, or t
  misc_feature (898)..(898): n is a, c, g, or t
  misc_feature (909)..(909): n is a, c, g, or t
  misc_feature (914)..(914): n is a, c, g, or t
  misc_feature (931)..(931): n is a, c, g, or t
  misc_feature (944)..(944): n is a, c, g, or t
  misc_feature (949)..(949): n is a, c, g, or t
  misc_feature (951)..(951): n is a, c, g, or t
  misc_feature (966)..(966): n is a, c, g, or t
  misc_feature (977)..(977): n is a, c, g, or t
  misc_feature (980)..(980): n is a, c, g, or t
  misc_feature (983)..(983): n is a, c, g, or t
  misc_feature (1001)..(1001): n is a, c, g, or t
  misc_feature (1003)..(1003): n is a, c, g, or t
  misc_feature (1011)..(1011): n is a, c, g, or t
  misc_feature (1017)..(1018): n is a, c, g, or t
  misc_feature (1026)..(1026): n is a, c, g, or t
  misc_feature (1028)..(1028): n is a, c, g, or t
  misc_feature (1030)..(1030): n is a, c, g, or t
  misc_feature (1046)..(1046): n is a, c, g, or t
  misc_feature (1051)..(1051): n is a, c, g, or t
  misc_feature (1063)..(1064): n is a, c, g, or t
  misc_feature (1072)..(1072): n is a, c, g, or t
  misc_feature (1077)..(1077): n is a, c, g, or t
  misc_feature (1079)..(1079): n is a, c, g, or t
  misc_feature (1082)..(1083): n is a, c, g, or t
  misc_feature (1094)..(1095): n is a, c, g, or t
  misc_feature (1098)..(1098): n is a, c, g, or t
  misc_feature (1101)..(1101): n is a, c, g, or t
  misc_feature (1106)..(1106): n is a, c, g, or t
  misc_feature (1117)..(1117): n is a, c, g, or t
  misc_feature (1120)..(1120): n is a, c, g, or t
  misc_feature (1130)..(1130): n is a, c, g, or t
  misc_feature (1135)..(1135): n is a, c, g, or t
  misc_feature (1146)..(1148): n is a, c, g, or t
  misc_feature (1155)..(1158): n is a, c, g, or t
  misc_feature (1160)..(1160): n is a, c, g, or t
  misc_feature (1162)..(1162): n is a, c, g, or t
  misc_feature (1169)..(1169): n is a, c, g, or t
  misc_feature (1174)..(1174): n is a, c, g, or t
  misc_feature (1184)..(1184): n is a, c, g, or t
  misc_feature (1188)..(1189): n is a, c, g, or t
  misc_feature (1200)..(1200): n is a, c, g, or t
naattagagaaattactatgagaggatcgcatcaccatcaccatcacggatcctatttaggtgacactatagaatcgtcgacccacgcgtccgccaagatgccgcccaaaggaaaaagtggttctggaaaagcggggaaagggggagcagcctctgggagtgacagtgctgacaagaaggctcaaggtcccaaaggtggtggcaatgcagtaaaggtcagacacattctatgtgaaaaacatggcaaaatcatggaagccatggaaaagttaaagtctgggatgagattcaatgaagtggccgcacagtatagtgaagataaagccaggcaagggggtgacttgggttggatgaccagagggtccatggtgggaccatttcaagaagcagcatttgccttgcctgtaagtgggatggataagcctgtgtttacagacccaccggttaagacaaaatttggatatcatattattatggtcgaaggaagaaaataaaatcatatgaaagactgannaanaaaaanaaaaanaaaaaaaaaannnanaaaannannannnnnnannnnnnnnannnnnnannannnannnnnnnaggggngncccccccctatagngngccnnattaaccttanttacctgacctngnnccccnnttgaaaaanccngtaatgcccccaaaacnccnnctggattttttcaaaacccncggttgcccccgggnnttttttnttgnngaaaanccancctaccttggcgaaattttcngganctaggnacctaaaatggaaaaaaaaanccctggatatncccccgttgaaatttccccanggcntcctaaaaanantttttggggcntttcnncccnttgncccnagngncccanaaacccaacccnttcncctggaaaatnacccncccttttttaaaacccnaaaaaaaaaaaanccccnantttttttccgggccntttttttcccnttnttnccccccccgaaaaaaagncncccccccnaaattnnttttgggnantnaaaaaaacggggaccnggggnaatgggaaaaannttcccccnttttnanccnnttttcctgaannaanatnaaaantttttctcccnccnggaggaaaanccccnaaaatttccgnnngtttttnnnnananttccccnaaaangggggggttncggnnaaaacccgccn

SEQ ID NO: 532 - DNA, 1043 bp, Homo Sapiens
  misc_feature (567)..(567): n is a, c, g, or t
  misc_feature (642)..(642): n is a, c, g, or t
  misc_feature (677)..(677): n is a, c, g, or t
  misc_feature (679)..(679): n is a, c, g, or t
  misc_feature (689)..(689): n is a, c, g, or t
  misc_feature (693)..(693): n is a, c, g, or t
  misc_feature (709)..(709): n is a, c, g, or t
  misc_feature (713)..(713): n is a, c, g, or t
  misc_feature (715)..(715): n is a, c, g, or t
  misc_feature (724)..(724): n is a, c, g, or t
  misc_feature (733)..(733): n is a, c, g, or t
  misc_feature (739)..(739): n is a, c, g, or t
  misc_feature (742)..(742): n is a, c, g, or t
  misc_feature (749)..(750): n is a, c, g, or t
  misc_feature (753)..(753): n is a, c, g, or t
  misc_feature (760)..(760): n is a, c, g, or t
  misc_feature (763)..(763): n is a, c, g, or t
  misc_feature (766)..(766): n is a, c, g, or t
  misc_feature (769)..(769): n is a, c, g, or t
  misc_feature (786)..(786): n is a, c, g, or t
  misc_feature (788)..(789): n is a, c, g, or t
  misc_feature (793)..(793): n is a, c, g, or t
  misc_feature (808)..(808): n is a, c, g, or t
  misc_feature (811)..(811): n is a, c, g, or t
  misc_feature (814)..(814): n is a, c, g, or t
  misc_feature (819)..(820): n is a, c, g, or t
  misc_feature (832)..(832): n is a, c, g, or t
  misc_feature (840)..(840): n is a, c, g, or t
  misc_feature (843)..(844): n is a, c, g, or t
  misc_feature (860)..(860): n is a, c, g, or t
  misc_feature (867)..(867): n is a, c, g, or t
  misc_feature (870)..(870): n is a, c, g, or t
  misc_feature (873)..(873): n is a, c, g, or t
  misc_feature (879)..(879): n is a, c, g, or t
  misc_feature (883)..(883): n is a, c, g, or t
  misc_feature (886)..(886): n is a, c, g, or t
  misc_feature (894)..(894): n is a, c, g, or t
  misc_feature (897)..(900): n is a, c, g, or t
  misc_feature (911)..(915): n is a, c, g, or t
  misc_feature (918)..(920): n is a, c, g, or t
  misc_feature (925)..(925): n is a, c, g, or t
  misc_feature (930)..(931): n is a, c, g, or t
  misc_feature (934)..(934): n is a, c, g, or t
  misc_feature (936)..(936): n is a, c, g, or t
  misc_feature (938)..(938): n is a, c, g, or t
  misc_feature (940)..(941): n is a, c, g, or t
  misc_feature (945)..(946): n is a, c, g, or t
  misc_feature (948)..(951): n is a, c, g, or t
  misc_feature (953)..(953): n is a, c, g, or t
  misc_feature (957)..(960): n is a, c, g, or t
  misc_feature (965)..(965): n is a, c, g, or t
  misc_feature (967)..(968): n is a, c, g, or t
  misc_feature (973)..(973): n is a, c, g, or t
  misc_feature (978)..(978): n is a, c, g, or t
  misc_feature (980)..(980): n is a, c, g, or t
  misc_feature (985)..(987): n is a, c, g, or t
  misc_feature (989)..(989): n is a, c, g, or t
  misc_feature (991)..(997): n is a, c, g, or t
  misc_feature (1000)..(1012): n is a, c, g, or t
  misc_feature (1015)..(1017): n is a, c, g, or t
  misc_feature (1020)..(1020): n is a, c, g, or t
  misc_feature (1022)..(1022): n is a, c, g, or t
  misc_feature (1025)..(1028): n is a, c, g, or t
  misc_feature (1031)..(1031): n is a, c, g, or t
  misc_feature (1036)..(1038): n is a, c, g, or t
  misc_feature (1041)..(1043): n is a, c, g, or t
cataagagaaattactatgagaggatcgcatcaccatcaccatcacggatcctatttaggtgacactatagaatcgtcgacccacgcgtccgagatcctggaggagatcaagcaggagcggaggctgcgcccggtgcggggcgagggctgggctgcccgcgggtttggctctctgccctgcatcctcaacgcctgctccggagatgccaagtccacctcctgcatcaacctgtcagtcacagatgctgggggcagcgcccagcgcccgcggccccgcgtgctgctcaaggcgcctaccttggctgaaatggaagagatgaatacatctgaggaagaagagtctccgtgtggggaggtgacgctgaaacgggaccgctccttctcagagcatgacctggcccagctccgaagtgaggtggcctctggcctgcagtcggccacccaccccccaggagggacggagccaccacggccccgagctggcagtgcgcatgtgtggaggcccggctcccgagaccagggtacctgtcccgcgagtgtctctgaccccagccaccccctactcancaaccggggctcctcgggggacagacccgaggcctccatgacccccgatgccaaacacctgtggctggagttcanccaccccgtggagagcctggcgctgactgtggaanangtgatggacntgcnccgtgtgctggtgaangccnanatggaaaantttttgcanaacaanganctcttcnncantctgaanaanggnaanatttgctgctgctgccngnncaanttcccgctgttctcntgnccncccanntgtctcttctgnaaaaaaanccnnctgcacttcctgtatnataaaanatnaanatgccnttcnaanaaatttgnaannnntccctgtctannnnntgnnnttttnaaaannctnanangnnatanntnnnnanaacnnnncaatncnnaaaanaaaantnttttnnntntnnnnnnnggnnnnnnnnnnnnnaannntgnanaannnnttnccccnnnttnnn

SEQ ID NO: 533 - DNA, 1196 bp, Homo Sapiens
  misc_feature (1)..(1): n is a, c, g, or t
  misc_feature (911)..(911): n is a, c, g, or t
  misc_feature (916)..(916): n is a, c, g, or t
  misc_feature (926)..(926): n is a, c, g, or t
  misc_feature (956)..(956): n is a, c, g, or t
  misc_feature (977)..(977): n is a, c, g, or t
  misc_feature (980)..(980): n is a, c, g, or t
  misc_feature (997)..(997): n is a, c, g, or t
  misc_feature (1015)..(1015): n is a, c, g, or t
  misc_feature (1020)..(1020): n is a, c, g, or t
  misc_feature (1023)..(1023): n is a, c, g, or t
  misc_feature (1026)..(1026): n is a, c, g, or t
  misc_feature (1030)..(1030): n is a, c, g, or t
  misc_feature (1038)..(1038): n is a, c, g, or t
  misc_feature (1059)..(1059): n is a, c, g, or t
  misc_feature (1068)..(1068): n is a, c, g, or t
  misc_feature (1072)..(1072): n is a, c, g, or t
  misc_feature (1075)..(1076): n is a, c, g, or t
  misc_feature (1082)..(1082): n is a, c, g, or t
  misc_feature (1094)..(1095): n is a, c, g, or t
  misc_feature (1099)..(1099): n is a, c, g, or t
  misc_feature (1110)..(1110): n is a, c, g, or t
  misc_feature (1126)..(1127): n is a, c, g, or t
  misc_feature (1156)..(1156): n is a, c, g, or t
  misc_feature (1160)..(1160): n is a, c, g, or t
  misc_feature (1171)..(1172): n is a, c, g, or t
  misc_feature (1182)..(1182): n is a, c, g, or t
  misc_feature (1190)..(1190): n is a, c, g, or t
  misc_feature (1194)..(1194): n is a, c, g, or t
naattagagaaattactatgagaggatcgcatcaccatcaccatcacggatcctatttaggtgacactatagaatcgtcgacccacgcgtccgatgctaacaacactgagaatagcactactgtgaagaattctagtttgttgagtggattcagaggaggttctagctacaaccatgaaacagagactatctttgcattaccaaggatgcagcttgactttaaatccattcatgttcaagaaccacaggagccttcattacaggatgccagcctgaagccaaaagtagaatgtagtgtggtgacagagttcactgaccacatttgtgtgactatggatgctgagctcatcatgtttcttcatgatttagtatcagcttatcttaaagaaaaagaaaaagccatctttccacctcggattttatctactcgaccaggacaaaaaagtccaattattatacatgacgacaattcctctgataaagatagagaagatagcatcacttatactactgtggactggagagattttatgtgcaatacatggcatctagaacctactcttagattaatttcttggactggaagaaagattgatccagtaggtgttgattatattcttcaaaaattgggctttcatcatgctaggactactattcctaaatggcttcaaagaggagtcatggatccactggacaaggttctgtcagttcttatcaaaaagctcggtactgcactacaggatgaaaaggaaaagaaaggcaaagacaaagaagaacactaaaaaagtaatttgatctgtgaacaaattatgattgtgtctgttttattacactggagtgtttttttagtataataatttgaaatataactttaaaataaattctaaaatttgtggctataattaaaaagntttgnaagttaaccnggttctagttccatcattctgtgtaccagngaagtattgcatgataatggnaanttttggggaaaaactanattaaaaaaaataaccgncttgntanggnttanaattaaanaaggggcaaacaattccggcntctttaaangccngcnnaaaacngggaattttttnnttanggattggccgnaacttttaaaaaaaanntggtgaagaaaaggggattttgggggggncctnaattgcttttnnttttaaaggnaacttttnaaancc

SEQ ID NO: 534 - DNA, 1200 bp, Homo Sapiens
  misc_feature (820)..(820): n is a, c, g, or t
  misc_feature (841)..(841): n is a, c, g, or t
  misc_feature (868)..(868): n is a, c, g, or t
  misc_feature (881)..(881): n is a, c, g, or t
  misc_feature (953)..(953): n is a, c, g, or t
  misc_feature (958)..(958): n is a, c, g, or t
  misc_feature (965)..(965): n is a, c, g, or t
  misc_feature (969)..(969): n is a, c, g, or t
  misc_feature (975)..(975): n is a, c, g, or t
  misc_feature (979)..(979): n is a, c, g, or t
  misc_feature (987)..(987): n is a, c, g, or t
  misc_feature (995)..(995): n is a, c, g, or t
  misc_feature (1018)..(1018): n is a, c, g, or t
  misc_feature (1026)..(1026): n is a, c, g, or t
  misc_feature (1032)..(1032): n is a, c, g, or t
  misc_feature (1037)..(1037): n is a, c, g, or t
  misc_feature (1041)..(1041): n is a, c, g, or t
  misc_feature (1043)..(1043): n is a, c, g, or t
  misc_feature (1055)..(1055): n is a, c, g, or t
  misc_feature (1078)..(1078): n is a, c, g, or t
  misc_feature (1080)..(1080): n is a, c, g, or t
  misc_feature (1109)..(1109): n is a, c, g, or t
  misc_feature (1115)..(1115): n is a, c, g, or t
  misc_feature (1119)..(1119): n is a, c, g, or t
  misc_feature (1125)..(1125): n is a, c, g, or t
  misc_feature (1142)..(1142): n is a, c, g, or t
  misc_feature (1146)..(1146): n is a, c, g, or t
  misc_feature (1173)..(1174): n is a, c, g, or t
  misc_feature (1179)..(1179): n is a, c, g, or t
  misc_feature (1182)..(1183): n is a, c, g, or t
  misc_feature (1188)..(1188): n is a, c, g, or t
atagagaaattactatgagaggatcgcatcaccatcaccatcacggatcctatttaggtgacactatagaatcgtcgacccacgcgtccgcccacgcgtccggtagacgccatgtccaaaagttaaatctactacagggacaagtttcagagctgccactcaggtctctagaagaaactgtcagtgccagtgaagaagaaaacgtgggacaccagcaggctgggaatgtgaagcagcaggaaaaatcgcagccctcagagagtcgctggctgaagtatctagaaaaggactcccaagaactggagctggaaggaacaggagtgtgtttcagcaaacagccttcatccaaaatggaggagccaggcccccgcttcagtcaagacctgcctagaaaaaggaagtggagcaggagcaccgtccagcctccgtgcagccgtggcgtgcaggactcgggtggctctgaggtcgcctggggaccccagaagggacaggctggcctgacatggaaggtgaaacaaggcagcagcccctgcctccaggagaactctgcagactgcagtgccggggagctgaggggtcctgggaaggagctatggagtcccatccagcaggatggctacaaagagatcttattttaaaagcagctgatggtttggaaatgagagaactacagtggtgaagagaccaggaggcagctctcagtgaaaccaacattgcggatgcccttcgtgagccttctcagtcccagcaggaagcccacaacactggcctccccagcctgcctgctgacaacacctaggcttactttatctaaaatcanagtgtaccaggtctgtagcanaaaataatcaactaaatgtcagggacntatgagtcatttnaaaacaaaagaaaaaagtgaaagccatttaggcaagctatgtgctgggctgctaacgtaaccccctgcaggnagggntcaggancgcnctgcantganccttgggntctcgcangcccagcccctgctgcaaggaanccagggcncccagnaaacntcancncacccccccccngggaccctccccttcatgtcccntngttttgctgccctaaatggcttcttgccncctaancccntgatcntggaaaaaggcaaaaantggncccgtaaaaaaactgcatttttccccnncttanccnntttgnaaaaaaaaaggg

SEQ ID NO: 535 - DNA, 1200 bp, Homo Sapiens
  misc_feature (805)..(805): n is a, c, g, or t
  misc_feature (827)..(827): n is a, c, g, or t
  misc_feature (869)..(869): n is a, c, g, or t
  misc_feature (887)..(887): n is a, c, g, or t
  misc_feature (890)..(890): n is a, c, g, or t
  misc_feature (894)..(894): n is a, c, g, or t
  misc_feature (899)..(899): n is a, c, g, or t
  misc_feature (921)..(921): n is a, c, g, or t
  misc_feature (927)..(927): n is a, c, g, or t
  misc_feature (933)..(933): n is a, c, g, or t
  misc_feature (988)..(989): n is a, c, g, or t
  misc_feature (997)..(997): n is a, c, g, or t
  misc_feature (1008)..(1008): n is a, c, g, or t
  misc_feature (1025)..(1025): n is a, c, g, or t
  misc_feature (1064)..(1064): n is a, c, g, or t
  misc_feature (1070)..(1070): n is a, c, g, or t
  misc_feature (1074)..(1074): n is a, c, g, or t
  misc_feature (1080)..(1080): n is a, c, g, or t
  misc_feature (1082)..(1083): n is a, c, g, or t
  misc_feature (1085)..(1085): n is a, c, g, or t
  misc_feature (1095)..(1095): n is a, c, g, or t
  misc_feature (1097)..(1099): n is a, c, g, or t
  misc_feature (1101)..(1103): n is a, c, g, or t
  misc_feature (1114)..(1114): n is a, c, g, or t
  misc_feature (1117)..(1117): n is a, c, g, or t
  misc_feature (1129)..(1129): n is a, c, g, or t
  misc_feature (1133)..(1134): n is a, c, g, or t
  misc_feature (1137)..(1137): n is a, c, g, or t
  misc_feature (1140)..(1140): n is a, c, g, or t
  misc_feature (1143)..(1143): n is a, c, g, or t
  misc_feature (1151)..(1151): n is a, c, g, or t
  misc_feature (1158)..(1158): n is a, c, g, or t
  misc_feature (1162)..(1163): n is a, c, g, or t
  misc_feature (1169)..(1169): n is a, c, g, or t
  misc_feature (1176)..(1176): n is a, c, g, or t
  misc_feature (1178)..(1179): n is a, c, g, or t
  misc_feature (1182)..(1182): n is a, c, g, or t
  misc_feature (1187)..(1187): n is a, c, g, or t
  misc_feature (1191)..(1191): n is a, c, g, or t
atagagaaattactatgagaggatcgcatcaccatcaccatcacggatcctatttaggtgacactatagaatcgtcgacccacgcgtccgaggcgatgtacaaccagggattcatccgaaagcagtgtgtggaccactacaacgaggtgaagagcgtcaccatctgcgattacctgcccccccacctggtgatttacatcgatgtgcccgttccagaggtccagaggcggattcagaagaaaggagatccacatgaaatgaagatcacctctgcctatctacaggacattgagaatgcctataagaaaacctttctccctgagatgagtgaaaaatgtgaggttttacagtattctgcaagggaagctcaagattcaaaaaaggtggtagaggacattgaatacctgaagttcgataaagggccgtggctcaagcaggacaatcgcactttataccacctgcgattactggttcaggataagtttgaggtgctgaattacacaagcattcctatctttctcccggaagtcaccattggagctcatcagactgaccgtgtcttacatcagttcagagagctgccgggccgcaagtacagccctgggtacaacaccgaggtgggagacaagtggatctggctgaagtgaacgggccgccttctgctccagctgcatcacagtgatggccaagctgcatcagccgcactctcctggacgccatatagctttaagatcgggggagggtaaataatgcaaaaattgcacagtggaagaaggggtctcacaaaaagcaatccatcctgtantataggtaatggagttgggggnaagcagcttccattctggatgtttggaaccctttagctttgnttttggaatggccccccnatnctcnctggnaaacagtggtctgctgtgaaanggccanctctcnggcagcccctggggtttcagcgctgccgctctgtgtcattcaggtggtgcacatnntttttctnctgacttccanaaataaaagtgtttccntggggaaaaaaaaaaaaaaaaaaaaaaaagggggggccncccccnatangggggncnnantaaactttantnnncnnnaccttgggacnccnggttgaaaaatncccnnaanggnccncccaaacnccccccngggnntttttnaaaaaancnncgntttcncccngggggtttt

SEQ ID NO: 536 - DNA, 1200 bp, Homo Sapiens
  misc_feature (2)..(2): n is a, c, g, or t
  misc_feature (700)..(700): n is a, c, g, or t
  misc_feature (818)..(818): n is a, c, g, or t
  misc_feature (822)..(822): n is a, c, g, or t
  misc_feature (833)..(833): n is a, c, g, or t
  misc_feature (841)..(841): n is a, c, g, or t
  misc_feature (845)..(845): n is a, c, g, or t
  misc_feature (877)..(877): n is a, c, g, or t
  misc_feature (887)..(887): n is a, c, g, or t
  misc_feature (893)..(893): n is a, c, g, or t
  misc_feature (914)..(914): n is a, c, g, or t
  misc_feature (918)..(918): n is a, c, g, or t
  misc_feature (922)..(922): n is a, c, g, or t
  misc_feature (925)..(926): n is a, c, g, or t
  misc_feature (932)..(932): n is a, c, g, or t
  misc_feature (935)..(935): n is a, c, g, or t
  misc_feature (938)..(938): n is a, c, g, or t
  misc_feature (944)..(944): n is a, c, g, or t
  misc_feature (962)..(962): n is a, c, g, or t
  misc_feature (971)..(971): n is a, c, g, or t
  misc_feature (974)..(974): n is a, c, g, or t
  misc_feature (978)..(979): n is a, c, g, or t
  misc_feature (983)..(983): n is a, c, g, or t
  misc_feature (993)..(993): n is a, c, g, or t
  misc_feature (997)..(997): n is a, c, g, or t
  misc_feature (999)..(999): n is a, c, g, or t
  misc_feature (1008)..(1009): n is a, c, g, or t
  misc_feature (1015)..(1015): n is a, c, g, or t
  misc_feature (1019)..(1024): n is a, c, g, or t
  misc_feature (1027)..(1027): n is a, c, g, or t
  misc_feature (1031)..(1031): n is a, c, g, or t
  misc_feature (1033)..(1034): n is a, c, g, or t
  misc_feature (1036)..(1036): n is a, c, g, or t
  misc_feature (1040)..(1040): n is a, c, g, or t
  misc_feature (1044)..(1044): n is a, c, g, or t
  misc_feature (1049)..(1049): n is a, c, g, or t
  misc_feature (1051)..(1051): n is a, c, g, or t
  misc_feature (1053)..(1053): n is a, c, g, or t
  misc_feature (1057)..(1059): n is a, c, g, or t
  misc_feature (1073)..(1074): n is a, c, g, or t
  misc_feature (1077)..(1078): n is a, c, g, or t
  misc_feature (1081)..(1081): n is a, c, g, or t
  misc_feature (1089)..(1089): n is a, c, g, or t
  misc_feature (1091)..(1092): n is a, c, g, or t
  misc_feature (1096)..(1096): n is a, c, g, or t
  misc_feature (1098)..(1100): n is a, c, g, or t
  misc_feature (1102)..(1103): n is a, c, g, or t
  misc_feature (1108)..(1110): n is a, c, g, or t
  misc_feature (1112)..(1113): n is a, c, g, or t
  misc_feature (1115)..(1115): n is a, c, g, or t
  misc_feature (1119)..(1120): n is a, c, g, or t
  misc_feature (1122)..(1123): n is a, c, g, or t
  misc_feature (1125)..(1125): n is a, c, g, or t
  misc_feature (1127)..(1129): n is a, c, g, or t
  misc_feature (1132)..(1134): n is a, c, g, or t
  misc_feature (1138)..(1139): n is a, c, g, or t
  misc_feature (1144)..(1145): n is a, c, g, or t
  misc_feature (1148)..(1148): n is a, c, g, or t
  misc_feature (1150)..(1151): n is a, c, g, or t
  misc_feature (1155)..(1156): n is a, c, g, or t
  misc_feature (1164)..(1164): n is a, c, g, or t
  misc_feature (1167)..(1169): n is a, c, g, or t
  misc_feature (1175)..(1179): n is a, c, g, or t
  misc_feature (1182)..(1182): n is a, c, g, or t
  misc_feature (1184)..(1195): n is a, c, g, or t
  misc_feature (1197)..(1198): n is a, c, g, or t
antagagaaattactatgagaggatcgcatcaccatcaccatcacggatcctatttaggtgacactatagaatcgtcgacccacgcgtccggaggctatgatggcggccatggcgacggctcgagtgcggatggggccgcggtgcgcccaggcgctctggcgcatgccgtggctgccggtgtttttgtcgttggcggcggcggcggcggcggcagcggcggagcagcaggtcccgctggtgctgtggtcgagtgaccgggacttgtgggctcctgcggccgacactcatgaaggccacatcaccagcgacttgcagctctctacctacttagatcccgccctggagctgggtcccaggaatgtgctgctgttcctgcaggacaagctgagcattgaggatttcacagcatatggcggtgtgtttggaaacaagcaggacagcgccttttctaacctagagaatgccctggacctggccccctcctcactggtgcttcctgccgtcgactggtatgcagtcagcactctgaccacttacctgcaggagaagctcggggccagccccttgcatgtggacctggccaccctgcgggagctgaagctcaatgccagcctccctgctctgctgctcattcgcctgccctacacagccagctctggtctgatggcacccagggaagtcctcacaggcaacgatgangtcatcgggcaggtcctgagcacactcaagtccgaagatgtcccatacacagcggccctcacagcggtccgcccttccagggtggcccgtgatgtaaccgtggtggccggaaggctangtcnccagctgctanaaaaacanccantatcacctgtgatccatcctcctgtgaattanaatgacaccnctcccngatcctgttctgggcccaaanttcnctgnggnntaaaangancantgggangacctgactcccctcacntttgggggnaanaaanncaanctgaatgggntccntntggaaaganncctttnccannnnnncantgancnnanaaanaaanctttngnancaannngaaatttaaatttnnttnnggncaaccccncnnaccnannntnngcccnnnanngnttannanngnannnccnnnaaanncaaannaangnncccnncccaattnaannnttccannnnnaangnnnnnnnnnnnntnntt

SEQ ID NO: 537 - DNA, 1200 bp, Homo Sapiens
  misc_feature (2)..(2): n is a, c, g, or t
  misc_feature (858)..(858): n is a, c, g, or t
  misc_feature (883)..(883): n is a, c, g, or t
  misc_feature (918)..(918): n is a, c, g, or t
  misc_feature (993)..(993): n is a, c, g, or t
  misc_feature (998)..(998): n is a, c, g, or t
  misc_feature (1010)..(1010): n is a, c, g, or t
  misc_feature (1017)..(1017): n is a, c, g, or t
  misc_feature (1019)..(1019): n is a, c, g, or t
  misc_feature (1023)..(1023): n is a, c, g, or t
  misc_feature (1028)..(1028): n is a, c, g, or t
  misc_feature (1036)..(1036): n is a, c, g, or t
  misc_feature (1041)..(1041): n is a, c, g, or t
  misc_feature (1056)..(1056): n is a, c, g, or t
  misc_feature (1060)..(1060): n is a, c, g, or t
  misc_feature (1071)..(1071): n is a, c, g, or t
  misc_feature (1075)..(1075): n is a, c, g, or t
  misc_feature (1079)..(1079): n is a, c, g, or t
  misc_feature (1086)..(1086): n is a, c, g, or t
  misc_feature (1096)..(1096): n is a, c, g, or t
  misc_feature (1101)..(1101): n is a, c, g, or t
  misc_feature (1112)..(1112): n is a, c, g, or t
  misc_feature (1121)..(1121): n is a, c, g, or t
  misc_feature (1124)..(1124): n is a, c, g, or t
  misc_feature (1129)..(1129): n is a, c, g, or t
  misc_feature (1142)..(1142): n is a, c, g, or t
  misc_feature (1145)..(1145): n is a, c, g, or t
  misc_feature (1154)..(1154): n is a, c, g, or t
  misc_feature (1160)..(1160): n is a, c, g, or t
  misc_feature (1167)..(1167): n is a, c, g, or t
  misc_feature (1170)..(1171): n is a, c, g, or t
  misc_feature (1179)..(1179): n is a, c, g, or t
  misc_feature (1186)..(1186): n is a, c, g, or t
  misc_feature (1193)..(1194): n is a, c, g, or t
antagagagattactatgagaggatcgcatcaccatcaccatcacggatcctatttaggtgacactatagaatcgtcgacccacgcgtccgcccacgcgtccgcgctgggcagtgtggaggtcgttggagtcacttccgcgtcaccagctcctgtgcctgccagtcggtgcccctcccgctccagccatgctctccgccctcgcccggcctgccagcgctgctctccgccgcagcttcagcacctcggcccagaacaatgctaaagtagctgtgctaggggcctctggaggcatcgggcagccactttcacttctcctgaagaacagccccttggtgagccgcctgaccctctatgatatcgcgcacacacccggagtggccgcagatctgagccacatcgagaccaaagccgctgtgaaaggctacctcggacctgaacagctgcctgactgcctgaaaggttgtgatgtggtagttattccggctggagtccccagaaagccaggcatgacccgggacgacctgttcaacaccaatgccacgattgtggccaccctgaccgctgcctgtgcccagcactgcccggaagccatgatctgcgtcattgccaatccggttaattccaccatccccatcacagcagaagttttcaagaagcatggagtgtacaaccccaacaaaatcttcggcgtgacgaccctggacatcgtcagagccaacacctttgttgcagagctgaagggtttggatccagctcgagtcaacgtccctgtcattggtggccatgctgggaagaccatcatccccctgatctctcagtgcacccccaaggtggactttccccaggaccagctganagcactcactgggcggatccaggangccggcacggaaggtggtcaaggctaaagccggancaggctctgccaccctctccatgggcgtatgccggcgcccgctttgtcttctcccttgtggatgcaatgaatggnaaagnaaggtgttgggnaatgttncnttcnttaantcccaagnaaaanggaaatgtaacctantttntcccaaaccgnttgnttgntttgggnaaaaaagggnattcnaaaaaaaaacntgggcatcnggnaaaantttcctttttttnaangaaaaaaanaatttncgaaagncannccccaaantgaaagncccccannaaaaaa

SEQ ID NO: 538 - DNA, 1200 bp, Homo Sapiens
  misc_feature (3)..(4): n is a, c, g, or t
  misc_feature (676)..(676): n is a, c, g, or t
  misc_feature (732)..(732): n is a, c, g, or t
  misc_feature (811)..(811): n is a, c, g, or t
  misc_feature (820)..(820): n is a, c, g, or t
  misc_feature (822)..(822): n is a, c, g, or t
  misc_feature (870)..(870): n is a, c, g, or t
  misc_feature (920)..(920): n is a, c, g, or t
  misc_feature (948)..(948): n is a, c, g, or t
  misc_feature (964)..(964): n is a, c, g, or t
  misc_feature (968)..(968): n is a, c, g, or t
  misc_feature (971)..(971): n is a, c, g, or t
  misc_feature (974)..(974): n is a, c, g, or t
  misc_feature (978)..(978): n is a, c, g, or t
  misc_feature (983)..(983): n is a, c, g, or t
  misc_feature (987)..(987): n is a, c, g, or t
  misc_feature (1003)..(1003): n is a, c, g, or t
  misc_feature (1006)..(1006): n is a, c, g, or t
  misc_feature (1013)..(1013): n is a, c, g, or t
  misc_feature (1015)..(1015): n is a, c, g, or t
  misc_feature (1032)..(1032): n is a, c, g, or t
  misc_feature (1040)..(1040): n is a, c, g, or t
  misc_feature (1074)..(1074): n is a, c, g, or t
  misc_feature (1083)..(1083): n is a, c, g, or t
  misc_feature (1086)..(1087): n is a, c, g, or t
  misc_feature (1090)..(1090): n is a, c, g, or t
  misc_feature (1098)..(1098): n is a, c, g, or t
  misc_feature (1102)..(1102): n is a, c, g, or t
  misc_feature (1109)..(1109): n is a, c, g, or t
  misc_feature (1121)..(1121): n is a, c, g, or t
  misc_feature (1141)..(1141): n is a, c, g, or t
  misc_feature (1155)..(1155): n is a, c, g, or t
  misc_feature (1176)..(1176): n is a, c, g, or t
  misc_feature (1181)..(1181): n is a, c, g, or t
  misc_feature (1186)..(1186): n is a, c, g, or t
  misc_feature (1190)..(1191): n is a, c, g, or t
ganntagaggagaattaactatgagaggatcgcatcaccatcaccatcacggatcctatttaggtgacactatagaatcgtcgacccacgcgtccgcccacgcgatccgaagagatcgagctccctggctgccggctcgccttctgcgtggagttctcgcggtctgggtttcgctgtctgctcttggcccggggtcattttgtcggcgtcgggtgccctctcttgcccagctggggcacagcgaggcggccccttctcccgacgacgttcgatggagtagggtcccagaccgttgtcccgaagagcgagatcgagcttggccccctcccccccctccttccctccctccttccttccgccgcaacatggctaacaacagccccgcgctgacaggcaactcgcagccgcagcaccaggcggctgcagctgcggctcagcaacagcagcagtgcggcggcggcggcgctaccaagccggcggtctccggcaagcagggcaatgtgctcccgctctggggcaacgagaagaccatgaacctcaaccccatgatcctgaccaacatcctgtcgtcgccttacttcaaagtacagctctacgagctcaagacctaccacgaggtggtggacgagatctactttaaggtcacgcacgttgaaccatgggagaaaggaagcangaaaacagcgggccagacagggatgtgcggaggggttcgaggtgttggaacaggangaattgtttctacagcattttgcctgttatacaaattatttaccctgaagttaactcgaaagcaagtgatgggtcttanaacacacananactctccatatattaaagcgcttggaattatgtaaaataaaaatatanacagcccccctaaaaaaatctggtgggaactgggtttgaaaatccttccnttgaagaatgaaaaaggaacctaaaatntgaaaggcctggttgnaagnctngtntaangaacnattnggaaaaaatgcttaanaanttttttntncaaaaaaactgggaagnggtttttntaactttgttttccaaaaaattcaaatttccaanttcaaaaanaannttngattcaanaaanttaaaanccccgaccttanaaaaaaacaaaaaaaaaaangggaaaggaaggtncttaaaaaaaaaaaacaaaanttttnaaacnaaanntttaaggtt

SEQ ID NO: 539 - DNA, 1200 bp, Homo Sapiens
  misc_feature (5)..(5): n is a, c, g, or t
  misc_feature (15)..(15): n is a, c, g, or t
  misc_feature (17)..(17): n is a, c, g, or t
  misc_feature (31)..(31): n is a, c, g, or t
  misc_feature (34)..(34): n is a, c, g, or t
  misc_feature (37)..(37): n is a, c, g, or t
  misc_feature (60)..(60): n is a, c, g, or t
  misc_feature (62)..(62): n is a, c, g, or t
  misc_feature (110)..(111): n is a, c, g, or t
  misc_feature (113)..(113): n is a, c, g, or t
  misc_feature (150)..(150): n is a, c, g, or t
  misc_feature (153)..(153): n is a, c, g, or t
  misc_feature (170)..(170): n is a, c, g, or t
  misc_feature (177)..(177): n is a, c, g, or t
  misc_feature (187)..(187): n is a, c, g, or t
  misc_feature (192)..(192): n is a, c, g, or t
  misc_feature (197)..(197): n is a, c, g, or t
  misc_feature (200)..(200): n is a, c, g, or t
  misc_feature (205)..(205): n is a, c, g, or t
  misc_feature (213)..(213): n is a, c, g, or t
  misc_feature (216)..(216): n is a, c, g, or t
  misc_feature (219)..(220): n is a, c, g, or t
  misc_feature (230)..(230): n is a, c, g, or t
  misc_feature (243)..(244): n is a, c, g, or t
  misc_feature (246)..(246): n is a, c, g, or t
  misc_feature (249)..(249): n is a, c, g, or t
  misc_feature (251)..(252): n is a, c, g, or t
  misc_feature (254)..(254): n is a, c, g, or t
  misc_feature (261)..(261): n is a, c, g, or t
  misc_feature (266)..(267): n is a, c, g, or t
  misc_feature (270)..(270): n is a, c, g, or t
  misc_feature (278)..(278): n is a, c, g, or t
  misc_feature (281)..(281): n is a, c, g, or t
  misc_feature (283)..(284): n is a, c, g, or t
  misc_feature (286)..(286): n is a, c, g, or t
  misc_feature (292)..(292): n is a, c, g, or t
  misc_feature (304)..(305): n is a, c, g, or t
  misc_feature (314)..(314): n is a, c, g, or t
  misc_feature (316)..(317): n is a, c, g, or t
  misc_feature (324)..(328): n is a, c, g, or t
  misc_feature (332)..(335): n is a, c, g, or t
  misc_feature (337)..(337): n is a, c, g, or t
  misc_feature (341)..(341): n is a, c, g, or t
  misc_feature (344)..(344): n is a, c, g, or t
  misc_feature (353)..(355): n is a, c, g, or t
  misc_feature (367)..(368): n is a, c, g, or t
  misc_feature (372)..(372): n is a, c, g, or t
  misc_feature (379)..(379): n is a, c, g, or t
  misc_feature (381)..(381): n is a, c, g, or t
  misc_feature (383)..(385): n is a, c, g, or t
  misc_feature (390)..(391): n is a, c, g, or t
  misc_feature (394)..(394): n is a, c, g, or t
  misc_feature (396)..(396): n is a, c, g, or t
  misc_feature (404)..(404): n is a, c, g, or t
  misc_feature (406)..(406): n is a, c, g, or t
  misc_feature (408)..(408): n is a, c, g, or t
  misc_feature (418)..(418): n is a, c, g, or t
  misc_feature (423)..(423): n is a, c, g, or t
  misc_feature (431)..(432): n is a, c, g, or t
  misc_feature (439)..(441): n is a, c, g, or t
  misc_feature (443)..(443): n is a, c, g, or t
  misc_feature (446)..(446): n is a, c, g, or t
  misc_feature (448)..(449): n is a, c, g, or t
  misc_feature (456)..(456): n is a, c, g, or t
  misc_feature (458)..(459): n is a, c, g, or t
  misc_feature (462)..(463): n is a, c, g, or t
  misc_feature (465)..(467): n is a, c, g, or t
  misc_feature (469)..(469): n is a, c, g, or t
  misc_feature (474)..(474): n is a, c, g, or t
  misc_feature (478)..(478): n is a, c, g, or t
  misc_feature (480)..(480): n is a, c, g, or t
  misc_feature (483)..(483): n is a, c, g, or t
  misc_feature (493)..(496): n is a, c, g, or t
  misc_feature (498)..(500): n is a, c, g, or t
  misc_feature (503)..(503): n is a, c, g, or t
  misc_feature (507)..(509): n is a, c, g, or t
  misc_feature (518)..(519): n is a, c, g, or t
  misc_feature (524)..(524): n is a, c, g, or t
  misc_feature (527)..(527): n is a, c, g, or t
  misc_feature (529)..(529): n is a, c, g, or t
  misc_feature (532)..(533): n is a, c, g, or t
  misc_feature (535)..(537): n is a, c, g, or t
  misc_feature (539)..(539): n is a, c, g, or t
  misc_feature (541)..(541): n is a, c, g, or t
  misc_feature (545)..(545): n is a, c, g, or t
  misc_feature (547)..(547): n is a, c, g, or t
  misc_feature (549)..(549): n is a, c, g, or t
  misc_feature (552)..(552): n is a, c, g, or t
  misc_feature (554)..(555): n is a, c, g, or t
  misc_feature (558)..(560): n is a, c, g, or t
  misc_feature (573)..(573): n is a, c, g, or t
  misc_feature (576)..(576): n is a, c, g, or t
  misc_feature (581)..(581): n is a, c, g, or t
  misc_feature (583)..(584): n is a, c, g, or t
  misc_feature (591)..(593): n is a, c, g, or t
  misc_feature (595)..(595): n is a, c, g, or t
  misc_feature (599)..(599): n is a, c, g, or t
  misc_feature (605)..(605): n is a, c, g, or t
  misc_feature (607)..(607): n is a, c, g, or t
  misc_feature (611)..(612): n is a, c, g, or t
  misc_feature (614)..(615): n is a, c, g, or t
  misc_feature (619)..(619): n is a, c, g, or t
  misc_feature (624)..(624): n is a, c, g, or t
  misc_feature (626)..(626): n is a, c, g, or t
  misc_feature (630)..(631): n is a, c, g, or t
  misc_feature (633)..(634): n is a, c, g, or t
  misc_feature (637)..(637): n is a, c, g, or t
  misc_feature (640)..(640): n is a, c, g, or t
  misc_feature (644)..(644): n is a, c, g, or t
  misc_feature (649)..(649): n is a, c, g, or t
  misc_feature (651)..(651): n is a, c, g, or t
  misc_feature (655)..(660): n is a, c, g, or t
  misc_feature (663)..(663): n is a, c, g, or t
  misc_feature (665)..(665): n is a, c, g, or t
  misc_feature (670)..(670): n is a, c, g, or t
  misc_feature (672)..(672): n is a, c, g, or t
  misc_feature (676)..(677): n is a, c, g, or t
  misc_feature (686)..(686): n is a, c, g, or t
  misc_feature (696)..(696): n is a, c, g, or t
  misc_feature (703)..(703): n is a, c, g, or t
  misc_feature (706)..(708): n is a, c, g, or t
  misc_feature (713)..(713): n is a, c, g, or t
  misc_feature (717)..(718): n is a, c, g, or t
  misc_feature (726)..(727): n is a, c, g, or t
  misc_feature (731)..(731): n is a, c, g, or t
  misc_feature (733)..(733): n is a, c, g, or t
  misc_feature (736)..(737): n is a, c, g, or t
  misc_feature (744)..(744): n is a, c, g, or t
  misc_feature (748)..(748): n is a, c, g, or t
  misc_feature (750)..(751): n is a, c, g, or t
  misc_feature (755)..(756): n is a, c, g, or t
  misc_feature (759)..(759): n is a, c, g, or t
  misc_feature (765)..(765): n is a, c, g, or t
  misc_feature (767)..(767): n is a, c, g, or t
  misc_feature (775)..(777): n is a, c, g, or t
  misc_feature (781)..(781): n is a, c, g, or t
  misc_feature (784)..(785): n is a, c, g, or t
  misc_feature (787)..(787): n is a, c, g, or t
  misc_feature (789)..(789): n is a, c, g, or t
  misc_feature (799)..(799): n is a, c, g, or t
  misc_feature (801)..(802): n is a, c, g, or t
  misc_feature (806)..(807): n is a, c, g, or t
  misc_feature (809)..(809): n is a, c, g, or t
  misc_feature (811)..(811): n is a, c, g, or t
  misc_feature (814)..(814): n is a, c, g, or t
  misc_feature (817)..(819): n is a, c, g, or t
  misc_feature (823)..(824): n is a, c, g, or t
  misc_feature (826)..(826): n is a, c, g, or t
  misc_feature (839)..(839): n is a, c, g, or t
  misc_feature (841)..(842): n is a, c, g, or t
  misc_feature (845)..(848): n is a, c, g, or t
  misc_feature (850)..(851): n is a, c, g, or t
  misc_feature (854)..(857): n is a, c, g, or t
  misc_feature (860)..(860): n is a, c, g, or t
  misc_feature (864)..(864): n is a, c, g, or t
  misc_feature (867)..(867): n is a, c, g, or t
  misc_feature (872)..(872): n is a, c, g, or t
  misc_feature (876)..(876): n is a, c, g, or t
  misc_feature (878)..(879): n is a, c, g, or t
  misc_feature (881)..(882): n is a, c, g, or t
  misc_feature (884)..(885): n is a, c, g, or t
  misc_feature (888)..(888): n is a, c, g, or t
  misc_feature (893)..(894): n is a, c, g, or t
  misc_feature (896)..(896): n is a, c, g, or t
  misc_feature (898)..(900): n is a, c, g, or t
  misc_feature (902)..(902): n is a, c, g, or t
  misc_feature (907)..(909): n is a, c, g, or t
  misc_feature (914)..(915): n is a, c, g, or t
  misc_feature (919)..(919): n is a, c, g, or t
  misc_feature (926)..(926): n is a, c, g, or t
  misc_feature (928)..(928): n is a, c, g, or t
  misc_feature (930)..(930): n is a, c, g, or t
  misc_feature (932)..(932): n is a, c, g, or t
  misc_feature (935)..(935): n is a, c, g, or t
  misc_feature (947)..(948): n is a, c, g, or t
  misc_feature (950)..(950): n is a, c, g, or t
  misc_feature (954)..(954): n is a, c, g, or t
  misc_feature (958)..(958): n is a, c, g, or t
  misc_feature (962)..(962): n is a, c, g, or t
  misc_feature (969)..(969): n is a, c, g, or t
  misc_feature (971)..(971): n is a, c, g, or t
  misc_feature (975)..(975): n is a, c, g, or t
  misc_feature (977)..(977): n is a, c, g, or t
  misc_feature (980)..(980): n is a, c, g, or t
  misc_feature (983)..(983): n is a, c, g, or t
  misc_feature (990)..(990): n is a, c, g, or t
  misc_feature (992)..(992): n is a, c, g, or t
  misc_feature (994)..(994): n is a, c, g, or t
  misc_feature (996)..(996): n is a, c, g, or t
  misc_feature (998)..(999): n is a, c, g, or t
  misc_feature (1003)..(1003): n is a, c, g, or t
  misc_feature (1007)..(1008): n is a, c, g, or t
  misc_feature (1019)..(1019): n is a, c, g, or t
  misc_feature (1021)..(1021): n is a, c, g, or t
  misc_feature (1024)..(1024): n is a, c, g, or t
  misc_feature (1034)..(1034): n is a, c, g, or t
  misc_feature (1038)..(1038): n is a, c, g, or t
  misc_feature (1044)..(1045): n is a, c, g, or t
  misc_feature (1049)..(1049): n is a, c, g, or t
  misc_feature (1052)..(1052): n is a, c, g, or t
  misc_feature (1061)..(1063): n is a, c, g, or t
  misc_feature (1065)..(1065): n is a, c, g, or t
  misc_feature (1070)..(1070): n is a, c, g, or t
  misc_feature (1074)..(1074): n is a, c, g, or t
  misc_feature (1080)..(1083): n is a, c, g, or t
  misc_feature (1085)..(1085): n is a, c, g, or t
  misc_feature (1088)..(1088): n is a, c, g, or t
  misc_feature (1093)..(1094): n is a, c, g, or t
  misc_feature (1096)..(1098): n is a, c, g, or t
  misc_feature (1106)..(1110): n is a, c, g, or t
  misc_feature (1113)..(1114): n is a, c, g, or t
  misc_feature (1119)..(1119): n is a, c, g, or t
  misc_feature (1121)..(1121): n is a, c, g, or t
  misc_feature (1124)..(1124): n is a, c, g, or t
  misc_feature (1129)..(1129): n is a, c, g, or t
  misc_feature (1132)..(1134): n is a, c, g, or t
  misc_feature (1136)..(1137): n is a, c, g, or t
  misc_feature (1140)..(1140): n is a, c, g, or t
  misc_feature (1144)..(1144): n is a, c, g, or t
  misc_feature (1147)..(1147): n is a, c, g, or t
  misc_feature (1149)..(1149): n is a, c, g, or t
  misc_feature (1153)..(1155): n is a, c, g, or t
  misc_feature (1157)..(1157): n is a, c, g, or t
  misc_feature (1161)..(1161): n is a, c, g, or t
  misc_feature (1166)..(1168): n is a, c, g, or t
  misc_feature (1170)..(1172): n is a, c, g, or t
  misc_feature (1178)..(1178): n is a, c, g, or t
  misc_feature (1180)..(1182): n is a, c, g, or t
  misc_feature (1184)..(1185): n is a, c, g, or t
  misc_feature (1189)..(1189): n is a, c, g, or t
  misc_feature (1193)..(1193): n is a, c, g, or t
  misc_feature (1195)..(1195): n is a, c, g, or t
  misc_feature (1197)..(1197): n is a, c, g, or t
ggttnaaaagaatancnatgagaggatcgcntcnccntcaccatcacggatcctatttangngacactatagaatcgtcgacccacgcgtccgcccacgcgatccgctgnngngcgcggcggcggctcccgggtagttcccgggcccggnggnggcgcggctgtggttgnctgagcnccgcgggccnccccncgccngcnccctnccctgcanccntcnntcgtcatcangcggagagtggcnncntgnanngnaaagttnaacannccnagtgcagncgncnngncagcangataggatccgnngtcaatccngnntatgggnnnnnggcnnnntncctncantatcaatgnnngtatcaaaatanncccntccatantnannntaaanntgngnacatcaantnanttcaccaganaacanaaaaattnngagacannntnctngnnctggatntnncannannntntaaangaanantantaaatcaatnnnncnnnaangctnnnattgacaanncaacnttnanctnntnnngntngaantngngtngnnaannngttaaggaccaanttntccgntnnaagattnnnanaaantcctcnangtgnncnnttanaaaanantatnncnnatnaanaatntcctntncatnnnnnnacnangcacncnatcnnacccttaanacatcaacantattcantannncacantcannaataaaanntgancnaanncgcatgnatanannattnnctnatttananccttagcnnnagtntcnnantntaaaaaaacnanngggnntncnaanctnnntatnnanaacatttttaaantnnctnnnntnntgnnnnacncctnaantcacnattntnnanncnnacnttagnnantnnnantatannnatgannttancatcctntnananggnacttaaaaaaannanactntttncaanccttttngnaacncnggnggnttcttcngntnananncaancttnnctatagatcangnacnacaactcaanttanatagtnncttngtnccctcttannncncatantgantcccannnntnagnactanncnnnaagcaaannnnnccnnaaatnancancaacntcnnnannccnatanatntnaaannnantccngattnnncnnnatgatntnnnanncacntctnantntat

SEQ ID NO: 540 - DNA, 1194 bp, Homo Sapiens
  misc_feature (866)..(866): n is a, c, g, or t
  misc_feature (889)..(889): n is a, c, g, or t
  misc_feature (893)..(893): n is a, c, g, or t
  misc_feature (975)..(975): n is a, c, g, or t
  misc_feature (985)..(985): n is a, c, g, or t
  misc_feature (1002)..(1002): n is a, c, g, or t
  misc_feature (1020)..(1021): n is a, c, g, or t
  misc_feature (1043)..(1043): n is a, c, g, or t
  misc_feature (1059)..(1059): n is a, c, g, or t
  misc_feature (1063)..(1063): n is a, c, g, or t
  misc_feature (1065)..(1066): n is a, c, g, or t
  misc_feature (1069)..(1069): n is a, c, g, or t
  misc_feature (1071)..(1077): n is a, c, g, or t
  misc_feature (1083)..(1083): n is a, c, g, or t
  misc_feature (1085)..(1085): n is a, c, g, or t
  misc_feature (1088)..(1094): n is a, c, g, or t
  misc_feature (1099)..(1099): n is a, c, g, or t
  misc_feature (1102)..(1102): n is a, c, g, or t
  misc_feature (1118)..(1118): n is a, c, g, or t
  misc_feature (1122)..(1122): n is a, c, g, or t
  misc_feature (1125)..(1125): n is a, c, g, or t
  misc_feature (1128)..(1128): n is a, c, g, or t
  misc_feature (1130)..(1130): n is a, c, g, or t
  misc_feature (1136)..(1136): n is a, c, g, or t
  misc_feature (1138)..(1138): n is a, c, g, or t
  misc_feature (1140)..(1140): n is a, c, g, or t
  misc_feature (1143)..(1143): n is a, c, g, or t
  misc_feature (1149)..(1152): n is a, c, g, or t
  misc_feature (1160)..(1160): n is a, c, g, or t
  misc_feature (1165)..(1167): n is a, c, g, or t
  misc_feature (1185)..(1185): n is a, c, g, or t
  misc_feature (1194)..(1194): n is a, c, g, or t
gaatagagagattactatgagaggatcgcatcaccatcaccatcacggatcctatttaggtgacactatagaatcgtcgacccacgcgtccgtgcttccgcaccctgaagctgaccacccccacctacggggacctcaaccacctggtgtcggccaccatgagcggggtcaccacctgcctgcgcttcccgggccagctgaacgcagacctgcgcaagctggcggtgaacatggtgcccttccctcgcctgcacttcttcatgcccggcttcgcgcccctgaccagccggggcagccagcagtaccgggcgctcacggtgcccgagctcacccagcagatgttcgactccaagaacatgatggccgcctgcgacccgcgccacggccgctacctgacggtggctgccatcttccggggccgcatgtccatgaaggaggtggacgagcagatgctcaacgtgcagaacaagaacagcagctacttcgtggagtggatccccaacaacgtgaagacggccgtgtgcgacatcccgccccgcggcctgaagatgtcggccaccttcatcggcaacagcacggccatccaggagctgttcaagcgcatctccgagcagttcacggccatgttccggcgcaaggccttcctgcactggtacacgggcgagggcatggacgagatggagttcaccgaggccgagagcaacatgaacgacctggtgtccgagtaccagcagtaccaggacgccacggccgacgaacaaggggagttcgaggaggaggagggcgaggacgaggcgtaaatgcccccgcgagacgggttagggaaagcggaggaggaaagcgagggggtggggggcttcccgggnacgataacctggcagtggaaagnaaanaaacatggtctactttaggtgtgcgctggggtctctggtgctcttcactgttgcctgtcacttttttttccttttttgtaanattgatgaanatcaatgtaacattttngaaaaattttctgaaatnntgttgtaatgggctaaaatcanataaacgtttttgttngaanannaanannnnnnnaaaaananaannnnnnnaaaanggnggccctcccaaaaggngccnaantancnttattnantnaanttggannnnttttgaanaatcnnnaagaccccaaaactcctntggattttn

SEQ ID NO: 541 - DNA, 1188 bp, Homo Sapiens
  misc_feature (1)..(1): n is a, c, g, or t
  misc_feature (129)..(129): n is a, c, g, or t
  misc_feature (170)..(170): n is a, c, g, or t
  misc_feature (328)..(328): n is a, c, g, or t
  misc_feature (336)..(336): n is a, c, g, or t
  misc_feature (352)..(352): n is a, c, g, or t
  misc_feature (364)..(364): n is a, c, g, or t
  misc_feature (386)..(386): n is a, c, g, or t
  misc_feature (389)..(389): n is a, c, g, or t
  misc_feature (397)..(397): n is a, c, g, or t
  misc_feature (407)..(407): n is a, c, g, or t
  misc_feature (432)..(432): n is a, c, g, or t
  misc_feature (437)..(438): n is a, c, g, or t
  misc_feature (441)..(441): n is a, c, g, or t
  misc_feature (452)..(453): n is a, c, g, or t
  misc_feature (455)..(455): n is a, c, g, or t
  misc_feature (471)..(471): n is a, c, g, or t
  misc_feature (483)..(483): n is a, c, g, or t
  misc_feature (493)..(493): n is a, c, g, or t
  misc_feature (495)..(495): n is a, c, g, or t
  misc_feature (532)..(532): n is a, c, g, or t
  misc_feature (548)..(548): n is a, c, g, or t
  misc_feature (578)..(578): n is a, c, g, or t
  misc_feature (633)..(633): n is a, c, g, or t
  misc_feature (667)..(667): n is a, c, g, or t
  misc_feature (696)..(696): n is a, c, g, or t
  misc_feature (735)..(735): n is a, c, g, or t
  misc_feature (744)..(744): n is a, c, g, or t
  misc_feature (758)..(758): n is a, c, g, or t
  misc_feature (777)..(777): n is a, c, g, or t
  misc_feature (782)..(782): n is a, c, g, or t
  misc_feature (807)..(807): n is a, c, g, or t
  misc_feature (828)..(828): n is a, c, g, or t
  misc_feature (834)..(834): n is a, c, g, or t
  misc_feature (861)..(861): n is a, c, g, or t
  misc_feature (873)..(873): n is a, c, g, or t
  misc_feature (880)..(880): n is a, c, g, or t
  misc_feature (887)..(889): n is a, c, g, or t
  misc_feature (914)..(914): n is a, c, g, or t
  misc_feature (916)..(916): n is a, c, g, or t
  misc_feature (919)..(919): n is a, c, g, or t
  misc_feature (931)..(931): n is a, c, g, or t
  misc_feature (941)..(941): n is a, c, g, or t
  misc_feature (943)..(943): n is a, c, g, or t
  misc_feature (945)..(945): n is a, c, g, or t
  misc_feature (958)..(958): n is a, c, g, or t
  misc_feature (973)..(973): n is a, c, g, or t
  misc_feature (980)..(980): n is a, c, g, or t
  misc_feature (983)..(984): n is a, c, g, or t
  misc_feature (989)..(989): n is a, c, g, or t
  misc_feature (992)..(992): n is a, c, g, or t
  misc_feature (994)..(994): n is a, c, g, or t
  misc_feature (998)..(1002): n is a, c, g, or t
  misc_feature (1005)..(1007): n is a, c, g, or t
  misc_feature (1013)..(1013): n is a, c, g, or t
  misc_feature (1016)..(1016): n is a, c, g, or t
  misc_feature (1029)..(1029): n is a, c, g, or t
  misc_feature (1036)..(1037): n is a, c, g, or t
  misc_feature (1049)..(1049): n is a, c, g, or t
  misc_feature (1057)..(1057): n is a, c, g, or t
  misc_feature (1060)..(1061): n is a, c, g, or t
  misc_feature (1063)..(1063): n is a, c, g, or t
  misc_feature (1067)..(1067): n is a, c, g, or t
  misc_feature (1070)..(1070): n is a, c, g, or t
  misc_feature (1077)..(1078): n is a, c, g, or t
  misc_feature (1082)..(1082): n is a, c, g, or t
  misc_feature (1093)..(1093): n is a, c, g, or t
  misc_feature (1103)..(1103): n is a, c, g, or t
  misc_feature (1106)..(1107): n is a, c, g, or t
  misc_feature (1111)..(1111): n is a, c, g, or t
  misc_feature (1115)..(1115): n is a, c, g, or t
  misc_feature (1118)..(1118): n is a, c, g, or t
  misc_feature (1120)..(1121): n is a, c, g, or t
  misc_feature (1124)..(1124): n is a, c, g, or t
  misc_feature (1136)..(1136): n is a, c, g, or t
  misc_feature (1140)..(1140): n is a, c, g, or t
  misc_feature (1142)..(1142): n is a, c, g, or t
  misc_feature (1149)..(1149): n is a, c, g, or t
  misc_feature (1152)..(1152): n is a, c, g, or t
  misc_feature (1155)..(1155): n is a, c, g, or t
  misc_feature (1158)..(1158): n is a, c, g, or t
  misc_feature (1160)..(1160): n is a, c, g, or t
  misc_feature (1167)..(1167): n is a, c, g, or t
  misc_feature (1169)..(1170): n is a, c, g, or t
nagagaaattactatgagaggatcgcatcaccatcaccatcacggatcctatttaggtgacactatagaatcgtcgacccacgcgtccggccaactctcgcactctgttcttccgccgctccgccgtcncgtttctctgccggtcgcaatggaagaagagatcgccgcgntggtcattgacaatggctccggcatgtgcaaagctggttttgctggggacgacgctccccgagccgtgtttccttccatcgtcgggcgccccagacaccagggcgtcatggtgggcatgggccagaaggactcctacgtgggcgacgaggcccagagnaagcgtgncatcctgaccctgaantaccccattgancatggcatcgtcaccaactggnacnacatgganaagatctggnaccacaccttctacaacgagctgcncgtgnnccnggaggaacacnnantgctgctgaccgaggnccccctgaaccncaaggccaananagagaagatgactcaaattatgtttgagaccttcaanaccccggccatgtacntggccatccaggccgtgctgtccctctacncctctgggcgcaccactggcattgtcatggactctggagacggggtcacccacanggtgcccatctacgagggctacgccctcccccangccatcctgcgtctggacctggctggccnggacctgaccgactacctcatgaagatcctcactgagcnaggctacancttcaccaccacgntcgatcgggaaaatcgtgngcganatcaaggaaaagctgtgctacgtcnccctggacttcaaaacagganatggtnaccgccgcatcctcctcttctctgganaagagctacganctgcccnatggccnnntcatcaccattggcaaatgaaccgntnccngtgtccggaagnccctgattcnancnttccttcctgggnagggaatcttggggnatccacnaannccacnttnantccnnnnngannngggacntgnaaatcccaaaaancttttannccaacacggggntgtcgggnggnncnaccntgnatccggnntttnccaaaggatgnaaaagaaatnacnncccngggnccnannccngaaaattaaatntttncnccccaanggnaanaancnggggggnannggggcccccccgggcccc

SEQ ID NO: 542 - DNA, 1200 bp, Homo Sapiens
  misc_feature (16)..(16): n is a, c, g, or t
  misc_feature (37)..(37): n is a, c, g, or t
  misc_feature (73)..(73): n is a, c, g, or t
  misc_feature (87)..(87): n is a, c, g, or t
  misc_feature (925)..(925): n is a, c, g, or t
  misc_feature (927)..(927): n is a, c, g, or t
  misc_feature (971)..(971): n is a, c, g, or t
  misc_feature (984)..(984): n is a, c, g, or t
  misc_feature (1023)..(1023): n is a, c, g, or t
  misc_feature (1031)..(1031): n is a, c, g, or t
  misc_feature (1048)..(1048): n is a, c, g, or t
  misc_feature (1057)..(1057): n is a, c, g, or t
  misc_feature (1063)..(1063): n is a, c, g, or t
  misc_feature (1081)..(1081): n is a, c, g, or t
  misc_feature (1087)..(1087): n is a, c, g, or t
  misc_feature (1094)..(1094): n is a, c, g, or t
  misc_feature (1097)..(1097): n is a, c, g, or t
  misc_feature (1106)..(1108): n is a, c, g, or t
  misc_feature (1126)..(1127): n is a, c, g, or t
  misc_feature (1129)..(1129): n is a, c, g, or t
  misc_feature (1139)..(1139): n is a, c, g, or t
  misc_feature (1143)..(1143): n is a, c, g, or t
  misc_feature (1149)..(1149): n is a, c, g, or t
  misc_feature (1155)..(1155): n is a, c, g, or t
  misc_feature (1162)..(1162): n is a, c, g, or t
  misc_feature (1164)..(1165): n is a, c, g, or t
  misc_feature (1174)..(1174): n is a, c, g, or t
  misc_feature (1185)..(1186): n is a, c, g, or t
  misc_feature (1191)..(1191): n is a, c, g, or t
  misc_feature (1193)..(1193): n is a, c, g, or t
gattagagagaattantatgagaggatcgcatccccntcatccatcacggatcctatttaggtgacactatantaatcgtcgacccncgcgtccgtcttcaatgagcagaaatatgctgatgcggtgaagaacttcttggatctgatttcgtcctcggggagaagagaccccaagagtgttgagcagcccatcgtgcttaaagaagggttcatgatcaagagggcccaaggacggaagcgctttgggatgaagaattttaagaagagatggtttcgcttgaccaaccatgaatttacctaccacaaaagcaaaggggaccagcctctctacagcattcccatcgagaacatcctggcagtggagaagctggaggaggagtctttcaaaatgaaaaacatgttccaggtcatccagccagagcgtgcgctgtacatccaggccaacaactgcgtggaggccaaggactggatcgacattctcaccaaagtgagccagtgcaaccagaagcgcctcaccgtctaccacccgtccgcctacctgagcggccactggctgtgctgtagggcgccatccgactcggctccgggctgctcgccctgcactggcggcctcccagccaacatccagctggacattgatggggaccgtgagacggagcgtatctactccctcttcaacttgtacatgagcaagctggagaagatgcaggaggcctgtgggagcaaatctgtgtatgacggcccggagcaggaggagtattcgacgttcgtcattgacgacccccaggagacctacaagacgctaaagcaagtcatcgctggggttggggctttggagcaggagcacgcccagtataaagagggacaagttcaagaagacgaaaatatggaagccaggagcaccccatcggagacaagagcttcnanaactacatccggcagcagtccgagacctccactcattccatttnaagtctgcgggangcccccagtggcgccagcaagctgcccatgcaaaagccncacccttngggaggaaaaaaaaaangaaaaaacncaaaanccggcaaaatgaaatgcncccccntccccgnccnaaaaaaaannnggggctggggttttcccnntnccaaaaacgnttgncaccancgcccncccctcncnnaaaaacccncttggccctgnngaaangngtccctc

SEQ ID NO: 543 - DNA, 1187 bp, Homo Sapiens
  misc_feature (82)..(82): n is a, c, g, or t
  misc_feature (877)..(877): n is a, c, g, or t
  misc_feature (891)..(891): n is a, c, g, or t
  misc_feature (906)..(906): n is a, c, g, or t
  misc_feature (978)..(978): n is a, c, g, or t
  misc_feature (993)..(993): n is a, c, g, or t
  misc_feature (999)..(999): n is a, c, g, or t
  misc_feature (1001)..(1001): n is a, c, g, or t
  misc_feature (1017)..(1017): n is a, c, g, or t
  misc_feature (1026)..(1027): n is a, c, g, or t
  misc_feature (1030)..(1030): n is a, c, g, or t
  misc_feature (1041)..(1041): n is a, c, g, or t
  misc_feature (1043)..(1043): n is a, c, g, or t
  misc_feature (1049)..(1049): n is a, c, g, or t
  misc_feature (1062)..(1062): n is a, c, g, or t
  misc_feature (1064)..(1064): n is a, c, g, or t
  misc_feature (1074)..(1074): n is a, c, g, or t
  misc_feature (1076)..(1076): n is a, c, g, or t
  misc_feature (1079)..(1079): n is a, c, g, or t
  misc_feature (1082)..(1082): n is a, c, g, or t
  misc_feature (1112)..(1112): n is a, c, g, or t
  misc_feature (1115)..(1115): n is a, c, g, or t
  misc_feature (1127)..(1127): n is a, c, g, or t
  misc_feature (1131)..(1131): n is a, c, g, or t
  misc_feature (1134)..(1134): n is a, c, g, or t
  misc_feature (1140)..(1141): n is a, c, g, or t
  misc_feature (1144)..(1144): n is a, c, g, or t
  misc_feature (1149)..(1149): n is a, c, g, or t
  misc_feature (1156)..(1156): n is a, c, g, or t
  misc_feature (1162)..(1162): n is a, c, g, or t
  misc_feature (1164)..(1164): n is a, c, g, or t
  misc_feature (1175)..(1175): n is a, c, g, or t
  misc_feature (1180)..(1180): n is a, c, g, or t
  misc_feature (1182)..(1182): n is a, c, g, or t
gaatagagagaattactatgagaggatcgcatcaccatcatccatcacggatcctatttaggtgacactatagtaatcgtcnacccacgcgtccggtagttttctctgcgcgtgtgcgttttccctcctcccccgccctcagggtccacggccaccatggcgtattaggggcagcagtgcctgcggcagcattggcctttgcagcggcggcagcagcaccaggctctgcagcggcaacccccagcggcttaagccatggcgcttctcacggcattcagcagcagcgttgctgtaaccgacaaagacaccttcgaattaagcacattcctcgattccagcaaagcaccgcaacatgaccgaaatgagcttcctgagcagcgaggtgttggtgggggacttgatgtcccccttcgacccgtcgggtttgggggctgaagaaagcctaggtctcttagatgattacctggaggtggccaagcacttcaaacctcatgggttctccagcgacaaggctaaggcgggctcctccgaatggctggctgtggatgggttggtcagtccctccaacaacagcaaggaggatgccttctccgggacagattggatgttggagaaaatggatttgaaggagttcgacttggatgccctgttgggtatagatgacctggaaaccatgccagatgaccttctgaccacgttggatgacacttgtgatctctttgcccccctagtccaggagactaataagcagcccccccagacggtgaacccaattggccatctcccagaaagtttaacaaaaacccgaccaggttgccccccttcaccttcttacaacctcttcccctttccccaggggtcctgtcctccactccanatcattccctttantttaaagctgggcantgaagtggatatcactgaaggaaaaaggaagccagactacactgcttacgtttgccatgatccctcatgcanaaaaggaagaaaaanaccccntncaaaaaaatgaaaagngggcatctnntangaacccaaaantncttatntggggtctccttnanaaaaaccccntntanaangggctctccaaaaaagaaaccccccatccncangggtttcctttngggntcngcccgnnccnaaacnttaaaantccccntngaaaaaaaaangtaancnccaaa

SEQ ID NO: 544 - DNA, 1200 bp, Homo Sapiens
  misc_feature (100)..(100): n is a, c, g, or t
  misc_feature (102)..(102): n is a, c, g, or t
  misc_feature (118)..(118): n is a, c, g, or t
  misc_feature (132)..(132): n is a, c, g, or t
  misc_feature (209)..(209): n is a, c, g, or t
  misc_feature (213)..(213): n is a, c, g, or t
  misc_feature (216)..(216): n is a, c, g, or t
  misc_feature (234)..(234): n is a, c, g, or t
  misc_feature (238)..(238): n is a, c, g, or t
  misc_feature (245)..(245): n is a, c, g, or t
  misc_feature (247)..(247): n is a, c, g, or t
  misc_feature (249)..(249): n is a, c, g, or t
  misc_feature (269)..(269): n is a, c, g, or t
  misc_feature (275)..(275): n is a, c, g, or t
  misc_feature (286)..(287): n is a, c, g, or t
  misc_feature (300)..(300): n is a, c, g, or t
  misc_feature (302)..(302): n is a, c, g, or t
  misc_feature (304)..(305): n is a, c, g, or t
  misc_feature (309)..(309): n is a, c, g, or t
  misc_feature (322)..(322): n is a, c, g, or t
  misc_feature (338)..(339): n is a, c, g, or t
  misc_feature (341)..(341): n is a, c, g, or t
  misc_feature (345)..(346): n is a, c, g, or t
  misc_feature (348)..(348): n is a, c, g, or t
  misc_feature (353)..(353): n is a, c, g, or t
  misc_feature (357)..(358): n is a, c, g, or t
  misc_feature (365)..(365): n is a, c, g, or t
  misc_feature (367)..(367): n is a, c, g, or t
  misc_feature (371)..(371): n is a, c, g, or t
  misc_feature (377)..(377): n is a, c, g, or t
  misc_feature (381)..(381): n is a, c, g, or t
  misc_feature (395)..(395): n is a, c, g, or t
  misc_feature (404)..(404): n is a, c, g, or t
  misc_feature (406)..(406): n is a, c, g, or t
  misc_feature (413)..(413): n is a, c, g, or t
  misc_feature (453)..(453): n is a, c, g, or t
  misc_feature (469)..(470): n is a, c, g, or t
  misc_feature (480)..(480): n is a, c, g, or t
  misc_feature (489)..(489): n is a, c, g, or t
  misc_feature (495)..(495): n is a, c, g, or t
  misc_feature (498)..(498): n is a, c, g, or t
  misc_feature (511)..(511): n is a, c, g, or t
  misc_feature (516)..(516): n is a, c, g, or t
  misc_feature (522)..(522): n is a, c, g, or t
  misc_feature (524)..(524): n is a, c, g, or t
  misc_feature (536)..(536): n is a, c, g, or t
  misc_feature (541)..(542): n is a, c, g, or t
  misc_feature (547)..(547): n is a, c, g, or t
  misc_feature (551)..(551): n is a, c, g, or t
  misc_feature (563)..(564): n is a, c, g, or t
  misc_feature (567)..(567): n is a, c, g, or t
  misc_feature (569)..(569): n is a, c, g, or t
  misc_feature (580)..(580): n is a, c, g, or t
  misc_feature (612)..(612): n is a, c, g, or t
  misc_feature (623)..(623): n is a, c, g, or t
  misc_feature (685)..(685): n is a, c, g, or t
  misc_feature (761)..(761): n is a, c, g, or t
  misc_feature (854)..(854): n is a, c, g, or t
  misc_feature (857)..(857): n is a, c, g, or t
  misc_feature (929)..(929): n is a, c, g, or t
  misc_feature (931)..(931): n is a, c, g, or t
  misc_feature (951)..(952): n is a, c, g, or t
  misc_feature (975)..(975): n is a, c, g, or t
  misc_feature (983)..(983): n is a, c, g, or t
  misc_feature (994)..(994): n is a, c, g, or t
  misc_feature (997)..(997): n is a, c, g, or t
  misc_feature (1003)..(1003): n is a, c, g, or t
  misc_feature (1012)..(1012): n is a, c, g, or t
  misc_feature (1020)..(1020): n is a, c, g, or t
  misc_feature (1025)..(1025): n is a, c, g, or t
  misc_feature (1035)..(1035): n is a, c, g, or t
  misc_feature (1041)..(1041): n is a, c, g, or t
  misc_feature (1049)..(1049): n is a, c, g, or t
  misc_feature (1059)..(1059): n is a, c, g, or t
  misc_feature (1061)..(1062): n is a, c, g, or t
  misc_feature (1070)..(1070): n is a, c, g, or t
  misc_feature (1072)..(1072): n is a, c, g, or t
  misc_feature (1079)..(1079): n is a, c, g, or t
  misc_feature (1093)..(1093): n is a, c, g, or t
  misc_feature (1097)..(1097): n is a, c, g, or t
  misc_feature (1104)..(1104): n is a, c, g, or t
  misc_feature (1106)..(1106): n is a, c, g, or t
  misc_feature (1110)..(1110): n is a, c, g, or t
  misc_feature (1116)..(1116): n is a, c, g, or t
  misc_feature (1119)..(1120): n is a, c, g, or t
  misc_feature (1125)..(1125): n is a, c, g, or t
  misc_feature (1128)..(1128): n is a, c, g, or t
  misc_feature (1137)..(1137): n is a, c, g, or t
  misc_feature (1142)..(1142): n is a, c, g, or t
  misc_feature (1149)..(1149): n is a, c, g, or t
  misc_feature (1163)..(1163): n is a, c, g, or t
  misc_feature (1165)..(1165): n is a, c, g, or t
  misc_feature (1172)..(1173): n is a, c, g, or t
  misc_feature (1178)..(1178): n is a, c, g, or t
  misc_feature (1180)..(1180): n is a, c, g, or t
  misc_feature (1182)..(1182): n is a, c, g, or t
  misc_feature (1184)..(1184): n is a, c, g, or t
  misc_feature (1196)..(1197): n is a, c, g, or t
agagaaattactatgagaggatcgcatcaccatcaccatcacggatcctatttaggtgacactatagaatcgtcgacccacgcgtccggagccatcttcngngcaggagtctgttggntctgctgtggtggncactgtggtggtccagccacccccacccacacagctccgaagtacaccatcttatcacttccccaagagctaatggncgangantaagctggcaccaccacnctcntggtaangngnctcacccccgagagagctgngcagtnacagctgctgnncaagcagctgccnangnngcanccacggaggaagnccaggccctggccatnnangcgnngntccangtcnngcatcangncgtnatgggnaccngagagcccatgganacctccgangnagcagcnaccgtgactcaggcggagctggggcacctgtcggccgagngtcaggaaggccaggnnaccaccatanccattgtgntgacanagnaggagctggctgncctgntgcatnancattatctgcangaggnncaggnccancagcagcatcannacntncccactgaggncctggcccctgccgacagtctcaacgacccanccattgagagnaattgcctcaatgagctggccggcacggtccccagcactgtggcgctgctgccctcaacggncactgagagcctggctccatccaacacatttgtggccccccagccggttgtggtggccagcccagccaagctgcangctgcagctaccctgaccgaagtggccaatggcatcgagtccctgggtgtgaagccagacctgccgcccccacccagcaaagcccccatgaanaangaaaaccagtggtttgatgtgggaagtcattaagggcaccaatgtaatggtgacacactatttcctgccacnanatgatgctgtcccatcaaannatgatttgggcaccgtccctgantataacanctgaaaaacanganctgcanccaggcaancctataantttcntgttgcggantcatgnctgtggcnggggcccttnanngaattcancnttaaaantgcctgcttggttnccangggcccntntgcnttaaantannaaaantcnggatgggtnactcnctgggancccctttggactcngnaaaatannaaatncngnantggcatcaaatnnaag

SEQ ID NO: 545 - DNA, 1199 bp, Homo Sapiens
  misc_feature (2)..(2): n is a, c, g, or t
  misc_feature (822)..(822): n is a, c, g, or t
  misc_feature (901)..(901): n is a, c, g, or t
  misc_feature (958)..(958): n is a, c, g, or t
  misc_feature (965)..(965): n is a, c, g, or t
  misc_feature (984)..(984): n is a, c, g, or t
  misc_feature (1012)..(1012): n is a, c, g, or t
  misc_feature (1022)..(1022): n is a, c, g, or t
  misc_feature (1045)..(1045): n is a, c, g, or t
  misc_feature (1053)..(1053): n is a, c, g, or t
  misc_feature (1066)..(1066): n is a, c, g, or t
  misc_feature (1068)..(1068): n is a, c, g, or t
  misc_feature (1075)..(1075): n is a, c, g, or t
  misc_feature (1079)..(1079): n is a, c, g, or t
  misc_feature (1095)..(1095): n is a, c, g, or t
  misc_feature (1099)..(1099): n is a, c, g, or t
  misc_feature (1119)..(1119): n is a, c, g, or t
  misc_feature (1125)..(1125): n is a, c, g, or t
  misc_feature (1137)..(1137): n is a, c, g, or t
  misc_feature (1141)..(1142): n is a, c, g, or t
  misc_feature (1145)..(1145): n is a, c, g, or t
  misc_feature (1156)..(1156): n is a, c, g, or t
  misc_feature (1159)..(1159): n is a, c, g, or t
  misc_feature (1161)..(1161): n is a, c, g, or t
  misc_feature (1168)..(1168): n is a, c, g, or t
  misc_feature (1170)..(1170): n is a, c, g, or t
  misc_feature (1175)..(1175): n is a, c, g, or t
  misc_feature (1177)..(1177): n is a, c, g, or t
  misc_feature (1181)..(1181): n is a, c, g, or t
  misc_feature (1186)..(1186): n is a, c, g, or t
  misc_feature (1189)..(1189): n is a, c, g, or t
  misc_feature (1192)..(1193): n is a, c, g, or t
  misc_feature (1197)..(1197): n is a, c, g, or t
  misc_feature (1199)..(1199): n is a, c, g, or t
gnatagagaaattactatgagaggatcgcatcaccatcaccatcacggatcctatttaggtgacactatagaatcgtcgacccacgcgtccgctccacccaagtcgccgtcttccgccaagagccgcctgcagacagcccccgtgcccatgccagacctgaagaatgtcaagtccaagatcggctccactgagaacctgaagcaccagccgggaggcgggaaggtgcaaatagtctacaaaccagttgacctgagcaaggtgacctccaagtgtggctcattaggcaacatccatcataaaccaggaggtggccaggtggaagtaaaatctgagaagcttgacttcaaggacagagtccagtcgaagattgggtccctggacaatatcacccacgtccctggcggaggaaataaaaagattgaaacccacaagctgaccttccgcgagaacgccaaagccaagacagaccacggggcggagatcgtgtacaagtcgccagtggtgtctggggacacgtctccacggcatctcagcaatgtctcctccaccggcagcatcgacatggtagactcgccccagctcgccacgctagctgacgaggtgtctgcctccctggccaagcagggtttgtgatcaggcccctggggcggtcaataattgtggagaggagagaatgagagagtgttcgtggagccacaggcagacgatgtcaaccttgtgtgagtgtgacgggggttggggtggggcgggaggccacgggggaggccgaggcaggggctgggcagaggggagaggaagcacaagaagtgggagtgggagangaagccacgtgctggagagtagacatccccctccttgccgctgggagagccaaggcctatgccacctgcagcgtctgancggccgctccctatagtgagtcgtattaagcttaattagctgagcttggactcctgnttgatanatcccagtaatgacctcanaactccatctggatttttttcaaaaccntcggttgccncccgggcgttttttttttggtgnaaaatccnagctaacttgggngnaattttncggnagcttaagggagcctnaaantggggaaaaaaaaatccctnggaatntaccccccgttntaannttnccccatgggcnttntnaaaaaananttttngngggnttttncantcnntttntn

SEQ ID NO: 546 - DNA, 1200 bp, Homo Sapiens
  misc_feature (884)..(884): n is a, c, g, or t
  misc_feature (911)..(911): n is a, c, g, or t
  misc_feature (913)..(913): n is a, c, g, or t
  misc_feature (922)..(922): n is a, c, g, or t
  misc_feature (925)..(925): n is a, c, g, or t
  misc_feature (939)..(939): n is a, c, g, or t
  misc_feature (961)..(961): n is a, c, g, or t
  misc_feature (970)..(970): n is a, c, g, or t
  misc_feature (972)..(972): n is a, c, g, or t
  misc_feature (974)..(974): n is a, c, g, or t
  misc_feature (1003)..(1003): n is a, c, g, or t
  misc_feature (1019)..(1019): n is a, c, g, or t
  misc_feature (1023)..(1023): n is a, c, g, or t
  misc_feature (1037)..(1037): n is a, c, g, or t
  misc_feature (1060)..(1060): n is a, c, g, or t
  misc_feature (1063)..(1063): n is a, c, g, or t
  misc_feature (1067)..(1067): n is a, c, g, or t
  misc_feature (1079)..(1079): n is a, c, g, or t
  misc_feature (1084)..(1084): n is a, c, g, or t
  misc_feature (1107)..(1107): n is a, c, g, or t
  misc_feature (1119)..(1119): n is a, c, g, or t
  misc_feature (1122)..(1122): n is a, c, g, or t
  misc_feature (1124)..(1124): n is a, c, g, or t
  misc_feature (1126)..(1126): n is a, c, g, or t
  misc_feature (1129)..(1129): n is a, c, g, or t
  misc_feature (1136)..(1136): n is a, c, g, or t
  misc_feature (1148)..(1148): n is a, c, g, or t
  misc_feature (1150)..(1150): n is a, c, g, or t
  misc_feature (1163)..(1163): n is a, c, g, or t
  misc_feature (1169)..(1169): n is a, c, g, or t
  misc_feature (1171)..(1171): n is a, c, g, or t
  misc_feature (1180)..(1180): n is a, c, g, or t
  misc_feature (1188)..(1189): n is a, c, g, or t
  misc_feature (1197)..(1197): n is a, c, g, or t
  misc_feature (1199)..(1199): n is a, c, g, or t
attagagaaattactatgagaggatcgcatcaccatcaccatcacggatcctatttaggtgacactatagaatcgtcgacccacgcgtccggtgggagcagacaatgtgggctccaagcagatgcagcagatccgcatgtcccttcgcgggaaggctgtggtgctgatgggcaagaacaccatgatgcgcaaggccatccgagggcacctggaaaacaacccagctctggagaaactgctgcctcatatccgggggaatgtgggctttgtgttcaccaaggaggacctcactgagatcagggacatgttgctggccaataaggtgccagctgctgcccgtgctggtgccattgccccatgtgaagtcactgtgccagcccagaacactggtctcgggcccgagaagacctcctttttccaggctttaggtatcaccactaaaatctccaggggcaccattgaaatcctgagtgatgtgcagctgatcaagactggagacaaagtgggagccagcgaagccacgctgctgaacatgctcaacatctcccccttctcctttgggctggtcatccagcaggtgttcgacaatggcagcatctacaaccctgaagtgcttgatatcacagaggaaactctgcattctcgcttcctggagggtgtccgcaatgttgccagtgtctgtctgcagattggctacccaactgttgcatcagtaccccattctatcatcaacgggtacaaacgagtcctggccttgtctgtggagacggattacaccttcccacttgctgaaaaggtcaaggccttcttggctgatccatctgcctttgtggctgctgcccctgtggctgctgccaccacagctgctcctgctgctgctgcanccccagctaaggttgaagccaaggaanantcggaggantcngacgagaatatggnatttggtctctttgactaatcnccaaaaacnancnacttaaccagttttatttgcaaaacaagnaaataaaggcttactntttnaaaaaaaaaaaaangggggcccctccctaaaagggantcnaatnaacttaaattanctganctggactcctgttgaaaaatccngaatgacccccnaancncntcnggatttnttcaaaaccctngnttgcccccgggcntttttntnggggaaaanccaacctnnttgggganant

SEQ ID NO: 547 - DNA, 1135 bp, Homo Sapiens
  misc_feature (7)..(7): n is a, c, g, or t
  misc_feature (13)..(13): n is a, c, g, or t
  misc_feature (716)..(716): n is a, c, g, or t
  misc_feature (736)..(736): n is a, c, g, or t
  misc_feature (755)..(755): n is a, c, g, or t
  misc_feature (798)..(798): n is a, c, g, or t
  misc_feature (815)..(815): n is a, c, g, or t
  misc_feature (818)..(818): n is a, c, g, or t
  misc_feature (845)..(845): n is a, c, g, or t
  misc_feature (848)..(848): n is a, c, g, or t
  misc_feature (878)..(878): n is a, c, g, or t
  misc_feature (880)..(880): n is a, c, g, or t
  misc_feature (886)..(886): n is a, c, g, or t
  misc_feature (896)..(896): n is a, c, g, or t
  misc_feature (906)..(906): n is a, c, g, or t
  misc_feature (952)..(952): n is a, c, g, or t
  misc_feature (957)..(957): n is a, c, g, or t
  misc_feature (959)..(959): n is a, c, g, or t
  misc_feature (981)..(982): n is a, c, g, or t
  misc_feature (989)..(990): n is a, c, g, or t
  misc_feature (998)..(998): n is a, c, g, or t
  misc_feature (1002)..(1002): n is a, c, g, or t
  misc_feature (1005)..(1005): n is a, c, g, or t
  misc_feature (1008)..(1009): n is a, c, g, or t
  misc_feature (1013)..(1013): n is a, c, g, or t
  misc_feature (1016)..(1016): n is a, c, g, or t
  misc_feature (1024)..(1024): n is a, c, g, or t
  misc_feature (1027)..(1028): n is a, c, g, or t
  misc_feature (1035)..(1037): n is a, c, g, or t
  misc_feature (1043)..(1044): n is a, c, g, or t
  misc_feature (1052)..(1053): n is a, c, g, or t
  misc_feature (1061)..(1061): n is a, c, g, or t
  misc_feature (1063)..(1063): n is a, c, g, or t
  misc_feature (1067)..(1067): n is a, c, g, or t
  misc_feature (1070)..(1070): n is a, c, g, or t
  misc_feature (1075)..(1077): n is a, c, g, or t
  misc_feature (1081)..(1081): n is a, c, g, or t
  misc_feature (1100)..(1100): n is a, c, g, or t
  misc_feature (1116)..(1116): n is a, c, g, or t
  misc_feature (1123)..(1123): n is a, c, g, or t
  misc_feature (1130)..(1130): n is a, c, g, or t
  misc_feature (1133)..(1133): n is a, c, g, or t
aagaatnagaganaattactatgagaggatcgcatcaccatcaccattcacggatcctatttaggtgacactatagaatcgtcgacccacgcgtccgggcaaaaagagaagaaagaaaggggagggggcgagtcacaggcggcggtggcggcggcagcagctgccggagcggaggcaacgagcagtccgagaaaaaccagcagcagcggcggcggcggcggcggcggcgcccaccccgaccagctgcagcatctgcatccccgctcctgggaactggagcgagcggtgccgggccagcaggcgaggggggcgacgcgcagacagcgggtcagagcgcgggcgcgcggggaccgtgcagcctgcgcgcggggccatgtaaactatctaactgtggtgtggccctcttttctctgccatagcaattcaagaatcagaggtgatttgctcttgatgggagacatgaactattatatcatcagttgaacctgcttttagccactgagcagagcaaaacaataagatccaatacaccaactgtgatggttaatactgtcaacttgattggattgaacaatgcaaagtattgatcctgggtgtgtctgtgtgggtgttgccaaaggagattaacatttgagtcagtgggctggggaaggcagacccacccttaacctggtgggcacagtctaatcagctgccagtgaatatgaagcaggaanaaagacagtgaaaaggtganactggcctggcctccccanccctacatctttctcccatgctggatgcttcctgtcctcaaanactggaactccacgttnttncacttttgaaaacttgaaactgggctngtnccttttgcctccttcaaagctttgcaaaanangccctnattgtggggnaaactttgtnaattgtggtaaaattgaaatattaccaataaaattttccccctttntaatntnattattattatattttaatatnntatattnntattttanattnttntcnncccnggnaaaaattnttnntcccctnnntagggnnaaccctgnnatttattntncccnacnaccannnaatntttttatttttttgggggnaaaaaaaaaaaaaatncctttgncaaaaanaanaa

SEQ ID NO: 548 - DNA, 1199 bp, Homo Sapiens
  misc_feature (898)..(898): n is a, c, g, or t
  misc_feature (928)..(928): n is a, c, g, or t
  misc_feature (948)..(948): n is a, c, g, or t
  misc_feature (951)..(951): n is a, c, g, or t
  misc_feature (963)..(963): n is a, c, g, or t
  misc_feature (978)..(979): n is a, c, g, or t
  misc_feature (981)..(981): n is a, c, g, or t
  misc_feature (983)..(983): n is a, c, g, or t
  misc_feature (1002)..(1002): n is a, c, g, or t
  misc_feature (1007)..(1007): n is a, c, g, or t
  misc_feature (1019)..(1019): n is a, c, g, or t
  misc_feature (1031)..(1031): n is a, c, g, or t
  misc_feature (1036)..(1036): n is a, c, g, or t
  misc_feature (1044)..(1044): n is a, c, g, or t
  misc_feature (1064)..(1064): n is a, c, g, or t
  misc_feature (1068)..(1068): n is a, c, g, or t
  misc_feature (1073)..(1073): n is a, c, g, or t
  misc_feature (1076)..(1076): n is a, c, g, or t
  misc_feature (1078)..(1079): n is a, c, g, or t
  misc_feature (1089)..(1089): n is a, c, g, or t
  misc_feature (1102)..(1103): n is a, c, g, or t
  misc_feature (1108)..(1108): n is a, c, g, or t
  misc_feature (1116)..(1116): n is a, c, g, or t
  misc_feature (1122)..(1122): n is a, c, g, or t
  misc_feature (1124)..(1125): n is a, c, g, or t
  misc_feature (1128)..(1128): n is a, c, g, or t
  misc_feature (1133)..(1133): n is a, c, g, or t
  misc_feature (1135)..(1135): n is a, c, g, or t
  misc_feature (1138)..(1138): n is a, c, g, or t
  misc_feature (1151)..(1151): n is a, c, g, or t
  misc_feature (1153)..(1153): n is a, c, g, or t
  misc_feature (1158)..(1158): n is a, c, g, or t
  misc_feature (1164)..(1164): n is a, c, g, or t
  misc_feature (1167)..(1167): n is a, c, g, or t
  misc_feature (1169)..(1169): n is a, c, g, or t
  misc_feature (1185)..(1185): n is a, c, g, or t
  misc_feature (1194)..(1194): n is a, c, g, or t
  misc_feature (1197)..(1197): n is a, c, g, or t
aatagagaaattaactatgagaggatcgcatcaccatcaccatcacggatcctatttaggtgacactatagaatcgtcgacccacgcgtccgcccacgcgtccgcgtcgccgccatcctcggcgcgactcgcttctttcggttctacctgggagaatccaccgccatccgccaccatggtgaacttcacggtagaccagatccgcgccatcatggacaagaaggccaacatccgcaacatgtctgtcatcgcccacgtggaccatggcaagtccacgctgacagactccctggtgtgcaaggcgggcatcatcgcctcggcccgggccggggagacacgcttcactgatacccggaaggacgagcaggagcgttgcatcaccatcaagtcaactgccatctccctcttctacgagctctcggagaatgacttgaacttcatcaagcagagcaaggacggtgccggcttcctcatcaacctcattgactcccccgggcatgtcgacttctcctcggaggtgactgctgccctccgagtcaccgatggcgcattggtggtggtggactgcgtgtcaggcgtgtgcgtgcagacggagacagtgctgcggcaggccattgccgagcgcatcaagcctgtgctgatgatgaacaagatggaccgcgccctgctggagctgcagctggagcccgaggagctctaccagactttccagcgcatcgtggagaacgtgaacgtcatcatctccacctacggcgagggcgagagcggccccatgggcaacatcatgatcgatcctgtcctcggtaccgtgggctttgggtctggcctccacgggtgggccttcaccctgaagcagtttgccgagatgtatgtggccaagttcgccgccaaggggganggccagttggggcctgccgagcgggccaanaagtaaaggacatgatgaanaanctgtggggtganaggtactttgaccanncnanggcaagttcagcaagtcanccacnacccccgaaggnaaaaactgccangcacntttggcantgatctggacccatcttcangggnttgangcntnntgaatttcanaaaaaggaaaagnnaactnataaaaantgggantnnaantggangnagnaaagaaaaaaggnancctgntaaagnttnangccccttgttcttgcnaaaaccttnttnaa

SEQ ID NO: 549 - DNA, 1200 bp, Homo Sapiens
  misc_feature (688)..(690): n is a, c, g, or t
  misc_feature (692)..(692): n is a, c, g, or t
  misc_feature (699)..(704): n is a, c, g, or t
  misc_feature (706)..(708): n is a, c, g, or t
  misc_feature (710)..(711): n is a, c, g, or t
  misc_feature (713)..(717): n is a, c, g, or t
  misc_feature (719)..(719): n is a, c, g, or t
  misc_feature (721)..(723): n is a, c, g, or t
  misc_feature (789)..(789): n is a, c, g, or t
  misc_feature (807)..(807): n is a, c, g, or t
  misc_feature (866)..(866): n is a, c, g, or t
  misc_feature (885)..(885): n is a, c, g, or t
  misc_feature (887)..(887): n is a, c, g, or t
  misc_feature (927)..(927): n is a, c, g, or t
  misc_feature (939)..(939): n is a, c, g, or t
  misc_feature (947)..(947): n is a, c, g, or t
  misc_feature (964)..(964): n is a, c, g, or t
  misc_feature (969)..(969): n is a, c, g, or t
  misc_feature (973)..(973): n is a, c, g, or t
  misc_feature (1004)..(1004): n is a, c, g, or t
  misc_feature (1013)..(1013): n is a, c, g, or t
  misc_feature (1015)..(1015): n is a, c, g, or t
  misc_feature (1025)..(1025): n is a, c, g, or t
  misc_feature (1033)..(1033): n is a, c, g, or t
  misc_feature (1038)..(1038): n is a, c, g, or t
  misc_feature (1040)..(1040): n is a, c, g, or t
  misc_feature (1045)..(1045): n is a, c, g, or t
  misc_feature (1065)..(1065): n is a, c, g, or t
  misc_feature (1070)..(1070): n is a, c, g, or t
  misc_feature (1080)..(1080): n is a, c, g, or t
  misc_feature (1082)..(1082): n is a, c, g, or t
  misc_feature (1097)..(1097): n is a, c, g, or t
  misc_feature (1106)..(1106): n is a, c, g, or t
  misc_feature (1109)..(1109): n is a, c, g, or t
  misc_feature (1121)..(1121): n is a, c, g, or t
  misc_feature (1126)..(1126): n is a, c, g, or t
  misc_feature (1132)..(1132): n is a, c, g, or t
  misc_feature (1140)..(1140): n is a, c, g, or t
  misc_feature (1154)..(1154): n is a, c, g, or t
  misc_feature (1162)..(1162): n is a, c, g, or t
  misc_feature (1166)..(1166): n is a, c, g, or t
  misc_feature (1170)..(1170): n is a, c, g, or t
  misc_feature (1179)..(1179): n is a, c, g, or t
  misc_feature (1185)..(1185): n is a, c, g, or t
  misc_feature (1189)..(1189): n is a, c, g, or t
  misc_feature (1198)..(1198): n is a, c, g, or t
taattagagaaattactatgagaggatcgcatcaccatcaccatcacggatcctatttaggtgacactatagaatcgtcgacccacgcgtccggtgccgatgggtggtgtgatgtctggggctgtccctgctgcagcagcccaggaggcggtggaagaagatatccccatagcgaaagaacggacacatttcaccgtccgcctgaccgaggcgaagcccgtggacaaagtgaagctgatcaaggaaatcaagaactacatccaaggcatcaacctcgtccaggcaaagaagctggtggagtccctgccccaggaaatcaaagccaatgtcgccaaagctgaggcggagaagatcaaggcggccctggaggcggtgggcggcaccgtggttctggagtagcctccagctcggaggacttgtgttcaggggtcctgggccccgggcgaggtcccgccctcccgtggtcactggctccgcccccagcaccaggcgcccagtggagccgtttgggagaattgcctgcgccacgcagcggggccggacaggccgcacagacctactgtggcgggagggaggggcggctgctgcctggtgacggcacccggaggcccaccaggacgcgccaccggtgaatgtgcctctggtggctgctgagaaaaatacactgtgcagctcagaaaaaaaaaannnanaaaaaannnnnnannnannannnnnanannngggcggccgctccctatagtgagtcgtattaagcttaattagctgagcttggactcctgttgatanatccagtaatgacctcanaactccatctggatttgttcaaaacgctcggttgccgccgggcgttttttattggtganaatccaagctagcttggcnanattttcaggagctaaggaagctaaatggaaaaaaaaatcnctggatataccnccgttganatatcccaatggcatcntaaanaaanattttgaggcatttcatcagttgctcaatgnacctaaaancnaaccgttcanctggaaantacgncnttttnaaaaccgtaaaaaaaaaaanccaanttttatccgncntttttccatttttgncccccgaanaangctcctccgaanttttnaggcantaaaaaangggaactggggaantggaaaangttncccnttttaaccnttttcngaanaaattaaantt

SEQ ID NO: 550 - DNA, 1200 bp, Homo Sapiens
  misc_feature (1)..(1): n is a, c, g, or t
  misc_feature (915)..(915): n is a, c, g, or t
  misc_feature (935)..(935): n is a, c, g, or t
  misc_feature (938)..(938): n is a, c, g, or t
  misc_feature (945)..(945): n is a, c, g, or t
  misc_feature (986)..(986): n is a, c, g, or t
  misc_feature (998)..(998): n is a, c, g, or t
  misc_feature (1017)..(1017): n is a, c, g, or t
  misc_feature (1019)..(1019): n is a, c, g, or t
  misc_feature (1049)..(1049): n is a, c, g, or t
  misc_feature (1084)..(1084): n is a, c, g, or t
  misc_feature (1108)..(1108): n is a, c, g, or t
  misc_feature (1118)..(1118): n is a, c, g, or t
  misc_feature (1128)..(1128): n is a, c, g, or t
  misc_feature (1133)..(1133): n is a, c, g, or t
  misc_feature (1139)..(1139): n is a, c, g, or t
  misc_feature (1144)..(1144): n is a, c, g, or t
  misc_feature (1171)..(1171): n is a, c, g, or t
  misc_feature (1182)..(1182): n is a, c, g, or t
  misc_feature (1189)..(1189): n is a, c, g, or t
  misc_feature (1198)..(1198): n is a, c, g, or t
naattagagaaattactatgagaggatcgcatcaccatcaccatcacggatcctatttaggtgacactatagaatcgtcgacccacgcgtccgccggaagaaaagttcaatctggaaacatcaatgctgccaagactattgcagatatcatccgaacatgtttgggacccaagtccatgatgaagatgcttttggacccaatgggaggcattgtgatgaccaatgatggcaatgccattcttcgagagattcaagtccagcatccagcggccaagtccatgatcgaaattagccggacccaggatgaagaggttggagatgggaccacatcagtaattattcttgcaggggaaatgctgtctgtagctgagcacttcctggagcagcagatgcacccaacagtggtgatcagtgcttaccgcaaggcattggatgatatgatcagcaccctaaagaaaataagtatcccagtcgacatcagtgacagtgatatgatgctgaacatcatcaacagctctattactaccaaagccatcagtcggtggtcatctttggcttgcaacattgccctggatgctgtcaagatggtacagtttgaggagaatggtcggaaagagattgacataaaaaaatatgcaagagtggaaaagatacctggaggcatcattgaagactcctgtgtcttgcgtggagtcatgattaacaaggatgtgacccatccacgtatgcggcgctatatcaagaaccctcgcattgtgctgctggattcttctctggaatacaagaaaggagaaagccagactggcattgagattacacgagaggaggacttcacccgaattctccagatggaggaagagtacatccagcagctctgtgaggacattatccaactgaagcccgatgtggtcatcnctgaaaagggcatctcaaanttnagctcancactaccttatgcgggccaatatcacagccatccccaaaantccggaaaacanacaataatcccattgctanancctggggggcccggatagtcccccgacccnaggaactgaaaaaaaatgatgttggaacaggaacnggcctgttggaaatcaaaaaaatnggaaaagaanactttacttncctcnctgacngcaanaccccagggctggcccattttcccccnggggggttaanaaaaaanttcccccgnaa

SEQ ID NO: 551 - DNA, 1194 bp, Homo Sapiens
  misc_feature (1)..(1): n is a, c, g, or t
  misc_feature (860)..(860): n is a, c, g, or t
  misc_feature (897)..(897): n is a, c, g, or t
  misc_feature (936)..(936): n is a, c, g, or t
  misc_feature (948)..(948): n is a, c, g, or t
  misc_feature (954)..(954): n is a, c, g, or t
  misc_feature (962)..(962): n is a, c, g, or t
  misc_feature (971)..(971): n is a, c, g, or t
  misc_feature (973)..(974): n is a, c, g, or t
  misc_feature (980)..(980): n is a, c, g, or t
  misc_feature (983)..(983): n is a, c, g, or t
  misc_feature (987)..(987): n is a, c, g, or t
  misc_feature (1012)..(1012): n is a, c, g, or t
  misc_feature (1027)..(1027): n is a, c, g, or t
  misc_feature (1035)..(1035): n is a, c, g, or t
  misc_feature (1044)..(1044): n is a, c, g, or t
  misc_feature (1057)..(1057): n is a, c, g, or t
  misc_feature (1066)..(1066): n is a, c, g, or t
  misc_feature (1077)..(1077): n is a, c, g, or t
  misc_feature (1089)..(1090): n is a, c, g, or t
  misc_feature (1102)..(1102): n is a, c, g, or t
  misc_feature (1109)..(1109): n is a, c, g, or t
  misc_feature (1113)..(1114): n is a, c, g, or t
  misc_feature (1117)..(1117): n is a, c, g, or t
  misc_feature (1122)..(1122): n is a, c, g, or t
  misc_feature (1146)..(1146): n is a, c, g, or t
  misc_feature (1149)..(1149): n is a, c, g, or t
  misc_feature (1151)..(1151): n is a, c, g, or t
  misc_feature (1154)..(1154): n is a, c, g, or t
  misc_feature (1156)..(1158): n is a, c, g, or t
  misc_feature (1170)..(1170): n is a, c, g, or t
  misc_feature (1176)..(1177): n is a, c, g, or t
  misc_feature (1181)..(1181): n is a, c, g, or t
naattagagagaattactatgagaggatcgcatcaccatcaccatcacggatcctatttaggtgacactatagaatcgtcgacccacgcgtccggtgacgagtcccgcgttctctccttgaatccactcgccagcccgccgccctctgccgccgcaccctgcacacccgcccctctcctgtgccaggaacttgctactaccagcaccatgccctaccaatatccagcactgaccccggagcagaagaaggagctgtctgacatcgctcaccgcatcgtggcacctggcaagggcatcctggctgcagatgagtccactgggagcattgccaagcggctgcagtccattggcaccgagaacaccgaggagaaccggcgcttctaccgccagctgctgctgacagctgacgaccgcgtgaacccctgcattgggggtgtcatcctcttccatgagacactctaccagaaggcggatgatgggcgtcccttcccccaagttatcaaatccaagggcggtgttgtgggcatcaaggtagacaagggcgtggtccccctggcagggacaaatggcgagactaccacccaagggttggatgggctgtctgagcgctgtgcccagtacaagaaggacggagctgacttcgccaagtggcgttgtgtgctgaagattggggaacacaccccctcagccctcgccatcatggaaaatgccaatgttctggcccgttatgccagtatctgccagcagaatggcattgtgcccatcgtggagcctgagatcctccctgatggggaccatgacttgaagcgctgccagtatgtgaccgaaaaggtgctggctgctgtctacaaggctctgantgaccaccacatctacctggaaagcaccttgctgaancccaacatggtcaccccaggccatgcttgcactcaaaanttttctcatgangaaatngccatggngaccgtcananngctgcnccnaaanggccccccgctgtcctgggaatacnttcctgttggaggcnaaatgggnagaagctcntcacctcaaggcnttaaaaagncccttgtgaancctgggcctgannttttctagggcnaacctgnaggnnttncctgnaggctggggggaaaaagaaaactnaangntgncnnnagaattttaagnacctgnnaaanctttttttaaaaa

SEQ ID NO: 552 - DNA, 1200 bp, Homo Sapiens
  misc_feature (1)..(2): n is a, c, g, or t
  misc_feature (4)..(4): n is a, c, g, or t
  misc_feature (833)..(833): n is a, c, g, or t
  misc_feature (913)..(913): n is a, c, g, or t
  misc_feature (954)..(954): n is a, c, g, or t
  misc_feature (980)..(980): n is a, c, g, or t
  misc_feature (982)..(982): n is a, c, g, or t
  misc_feature (986)..(987): n is a, c, g, or t
  misc_feature (989)..(989): n is a, c, g, or t
  misc_feature (994)..(994): n is a, c, g, or t
  misc_feature (997)..(998): n is a, c, g, or t
  misc_feature (1006)..(1006): n is a, c, g, or t
  misc_feature (1010)..(1010): n is a, c, g, or t
  misc_feature (1021)..(1021): n is a, c, g, or t
  misc_feature (1023)..(1023): n is a, c, g, or t
  misc_feature (1034)..(1034): n is a, c, g, or t
  misc_feature (1039)..(1039): n is a, c, g, or t
  misc_feature (1042)..(1044): n is a, c, g, or t
  misc_feature (1048)..(1048): n is a, c, g, or t
  misc_feature (1054)..(1054): n is a, c, g, or t
  misc_feature (1058)..(1058): n is a, c, g, or t
  misc_feature (1062)..(1062): n is a, c, g, or t
  misc_feature (1065)..(1065): n is a, c, g, or t
  misc_feature (1068)..(1068): n is a, c, g, or t
  misc_feature (1072)..(1072): n is a, c, g, or t
  misc_feature (1077)..(1077): n is a, c, g, or t
  misc_feature (1082)..(1082): n is a, c, g, or t
  misc_feature (1085)..(1085): n is a, c, g, or t
  misc_feature (1089)..(1089): n is a, c, g, or t
  misc_feature (1093)..(1093): n is a, c, g, or t
  misc_feature (1098)..(1098): n is a, c, g, or t
  misc_feature (1106)..(1106): n is a, c, g, or t
  misc_feature (1108)..(1109): n is a, c, g, or t
  misc_feature (1115)..(1115): n is a, c, g, or t
  misc_feature (1121)..(1121): n is a, c, g, or t
  misc_feature (1125)..(1125): n is a, c, g, or t
  misc_feature (1129)..(1129): n is a, c, g, or t
  misc_feature (1134)..(1134): n is a, c, g, or t
  misc_feature (1138)..(1138): n is a, c, g, or t
  misc_feature (1144)..(1144): n is a, c, g, or t
  misc_feature (1147)..(1147): n is a, c, g, or t
  misc_feature (1159)..(1161): n is a, c, g, or t
  misc_feature (1163)..(1163): n is a, c, g, or t
  misc_feature (1170)..(1170): n is a, c, g, or t
  misc_feature (1195)..(1195): n is a, c, g, or t
  misc_feature (1200)..(1200): n is a, c, g, or t
nnantagagaaattactatgagaggatcgcatcaccatcaccatcacggatcctatttaggtgacactatagaatcgtcgacccacgcgtccgcccacgcgtccgctttggaaaagaaaaccattgagtgggctgaagagattaagaaaatcgaagaagccgagcgggaagcagagtgcaaaattgcggaagcagaagctaaagtgaattctaagagtggcccagagggcgatagcaaaatgagcttctccaagactcacagtacagccacaatgccacctcctattaaccccatcctcgccagcttgcagcacaacagcatcctcacaccaactcgggtcagcagtagtgccacgaaacagaaagttctcagcccacctcacataaaggcggatttcaatcttgctgactttgagtgtgaagaagacccatttgataatctggagttaaaaactattgatgagaaggaagagctgagaaatattctggtaggaaccactggacccattatggctcagttattggacaataacttgcccaggggaggctctgggtctgtgttacaggatgaggaggtcctggcatccttggaacgggcaaccctagatttcaagcctcttcataaacccaatggctttataaccttaccacagttgggcaactgtgaaaagatgtcactgtcttccaaagtgtccctcccccctatacctgcagtaagcaatatcaaatccctgtctttccccaaacttgactctgatgacagcaatcagaagacagccaagctggcgagcactttccatagcacatcctgcctccgcaatggcacgttccanaattccctaaagccttccacccaaagcagtgccagtgagctcaatgggcatcacactcttgggctttcagccttgaactnggacagtggcccagagatgccagccctgacattcctcccanaggccttccctctctgttttgtctgngngccnnanaggantcnncccctccnaaanactgggtcccncnggtcccccccncctanttnnncagngtcccnagtngccnacntgncccngcctntcccnagncctntttngaatngcaaatgntnncccccnccaggnggcnatgnggggnaaangggggncanattgggccaccnnnanaaggggntcccccaaccttgaaaaaaaaaggnaaaan

SEQ ID NO: 553 - DNA, 1200 bp, Homo Sapiens
  misc_feature (1)..(1): n is a, c, g, or t
  misc_feature (400)..(400): n is a, c, g, or t
  misc_feature (515)..(515): n is a, c, g, or t
  misc_feature (523)..(523): n is a, c, g, or t
  misc_feature (525)..(525): n is a, c, g, or t
  misc_feature (531)..(534): n is a, c, g, or t
  misc_feature (540)..(545): n is a, c, g, or t
  misc_feature (547)..(547): n is a, c, g, or t
  misc_feature (553)..(554): n is a, c, g, or t
  misc_feature (558)..(560): n is a, c, g, or t
  misc_feature (562)..(562): n is a, c, g, or t
  misc_feature (564)..(564): n is a, c, g, or t
  misc_feature (569)..(569): n is a, c, g, or t
  misc_feature (574)..(576): n is a, c, g, or t
  misc_feature (578)..(579): n is a, c, g, or t
  misc_feature (584)..(585): n is a, c, g, or t
  misc_feature (588)..(590): n is a, c, g, or t
  misc_feature (592)..(592): n is a, c, g, or t
  misc_feature (594)..(594): n is a, c, g, or t
  misc_feature (597)..(598): n is a, c, g, or t
  misc_feature (603)..(605): n is a, c, g, or t
  misc_feature (607)..(607): n is a, c, g, or t
  misc_feature (611)..(611): n is a, c, g, or t
  misc_feature (626)..(627): n is a, c, g, or t
  misc_feature (634)..(635): n is a, c, g, or t
  misc_feature (637)..(638): n is a, c, g, or t
  misc_feature (654)..(654): n is a, c, g, or t
  misc_feature (658)..(658): n is a, c, g, or t
  misc_feature (665)..(665): n is a, c, g, or t
  misc_feature (667)..(667): n is a, c, g, or t
  misc_feature (678)..(678): n is a, c, g, or t
  misc_feature (681)..(681): n is a, c, g, or t
  misc_feature (692)..(692): n is a, c, g, or t
  misc_feature (698)..(698): n is a, c, g, or t
  misc_feature (700)..(700): n is a, c, g, or t
  misc_feature (703)..(703): n is a, c, g, or t
  misc_feature (728)..(728): n is a, c, g, or t
  misc_feature (730)..(731): n is a, c, g, or t
  misc_feature (740)..(740): n is a, c, g, or t
  misc_feature (752)..(752): n is a, c, g, or t
  misc_feature (756)..(759): n is a, c, g, or t
  misc_feature (761)..(761): n is a, c, g, or t
  misc_feature (785)..(786): n is a, c, g, or t
  misc_feature (788)..(788): n is a, c, g, or t
  misc_feature (797)..(798): n is a, c, g, or t
  misc_feature (803)..(804): n is a, c, g, or t
  misc_feature (814)..(814): n is a, c, g, or t
  misc_feature (819)..(819): n is a, c, g, or t
  misc_feature (822)..(823): n is a, c, g, or t
  misc_feature (833)..(835): n is a, c, g, or t
  misc_feature (843)..(843): n is a, c, g, or t
  misc_feature (850)..(850): n is a, c, g, or t
  misc_feature (864)..(864): n is a, c, g, or t
  misc_feature (867)..(868): n is a, c, g, or t
  misc_feature (881)..(881): n is a, c, g, or t
  misc_feature (887)..(887): n is a, c, g, or t
  misc_feature (890)..(892): n is a, c, g, or t
  misc_feature (907)..(907): n is a, c, g, or t
  misc_feature (912)..(913): n is a, c, g, or t
  misc_feature (919)..(919): n is a, c, g, or t
  misc_feature (921)..(922): n is a, c, g, or t
  misc_feature (928)..(928): n is a, c, g, or t
  misc_feature (934)..(936): n is a, c, g, or t
  misc_feature (955)..(955): n is a, c, g, or t
  misc_feature (958)..(958): n is a, c, g, or t
  misc_feature (966)..(966): n is a, c, g, or t
  misc_feature (974)..(974): n is a, c, g, or t
  misc_feature (981)..(981): n is a, c, g, or t
  misc_feature (985)..(985): n is a, c, g, or t
  misc_feature (990)..(990): n is a, c, g, or t
  misc_feature (993)..(994): n is a, c, g, or t
  misc_feature (1000)..(1002): n is a, c, g, or t
  misc_feature (1012)..(1013): n is a, c, g, or t
  misc_feature (1017)..(1017): n is a, c, g, or t
  misc_feature (1026)..(1026): n is a, c, g, or t
  misc_feature (1031)..(1032): n is a, c, g, or t
  misc_feature (1035)..(1036): n is a, c, g, or t
  misc_feature (1047)..(1047): n is a, c, g, or t
  misc_feature (1062)..(1062): n is a, c, g, or t
  misc_feature (1067)..(1069): n is a, c, g, or t
  misc_feature (1072)..(1074): n is a, c, g, or t
  misc_feature (1081)..(1081): n is a, c, g, or t
  misc_feature (1098)..(1100): n is a, c, g, or t
  misc_feature (1110)..(1110): n is a, c, g, or t
  misc_feature (1112)..(1112): n is a, c, g, or t
  misc_feature (1114)..(1115): n is a, c, g, or t
  misc_feature (1121)..(1122): n is a, c, g, or t
  misc_feature (1125)..(1125): n is a, c, g, or t
  misc_feature (1128)..(1128): n is a, c, g, or t
  misc_feature (1139)..(1139): n is a, c, g, or t
  misc_feature (1152)..(1152): n is a, c, g, or t
  misc_feature (1177)..(1177): n is a, c, g, or t
  misc_feature (1184)..(1184): n is a, c, g, or t
  misc_feature (1190)..(1190): n is a, c, g, or t
naattagagaaattactatgagaggatcgcatcaccatcaccatcacggatcctatttaggtgacactatagaatcgtcgacccacgcgtccgatcccacttgcccccacacggagactgactctaaaacccttcatccaatggtgctaacccccggctctcccctgccccacctcacccacccagagaagcacagaccccgccaggggcaggggcccaccgcacacccttgtcccgggcctgtctgggactggccttcccggctcagccagtgaggctcagaagggacacaaagagggatggaagaaaagaacaaagagaaactgttcctcccacccccttccctgatgccaggggcaccagactgattctgaggcacaaataaaagaggcttcatacnaaaaaaaaaaaaaaaaaaaaaaaaaaaaaaaaaaaaaaaaaaaaaaaaaaaaaaaaaaaaaaaaaaaaaaaaaaaaaaaaaaaaaaaaaaaaaaaaaaaaaaaaaaaaaaaaaangggggggncncccccnnnngggggnnnnnntnaatttnntttnnngnanttggnccccnnntnnaaaannccnnnangnccnnaaaannncntttngttttttttaaaaannttggttnncnncggggttttttttttngggnaaaaccnancttttttgggnaantttttgggganttaggnanttnaaatgggaaaaaaaattcctgggantnncccccgttnaattttcccaangggnnnncnaaaaaaaattttgggggtttttcnncngttggccannggaannaaaaacaaancgttncgnnggaatttaannncttttttnaagaccngaaaaaaaaaaaanccnnttttttttccggncttttnttnnnattttttggcccccngaaannagggcncnnccgaantttttnnngggaaaaaaaaaaaggggnacnggggaaanggaaaaangttcccntttntttanccnntttttnnnaaaaaaaaannaaanttttttttnccctnnggnngaaaaaacaanaaaaattttcggggnttttnnnaannntttttcnaaaaagggggggggttnnngggaaaaacngncnnttttcnnaanggnttttttaaaanttttttttttctnccccccccccgggggggttttcccnttttttntttaanggggcaaaaa

SEQ ID NO: 554 - DNA, 1200 bp, Homo Sapiens
  misc_feature (921)..(921): n is a, c, g, or t
  misc_feature (946)..(946): n is a, c, g, or t
  misc_feature (962)..(962): n is a, c, g, or t
  misc_feature (967)..(967): n is a, c, g, or t
  misc_feature (980)..(980): n is a, c, g, or t
  misc_feature (997)..(997): n is a, c, g, or t
  misc_feature (1001)..(1001): n is a, c, g, or t
  misc_feature (1006)..(1006): n is a, c, g, or t
  misc_feature (1015)..(1015): n is a, c, g, or t
  misc_feature (1019)..(1019): n is a, c, g, or t
  misc_feature (1021)..(1021): n is a, c, g, or t
  misc_feature (1024)..(1024): n is a, c, g, or t
  misc_feature (1027)..(1027): n is a, c, g, or t
  misc_feature (1033)..(1033): n is a, c, g, or t
  misc_feature (1037)..(1037): n is a, c, g, or t
  misc_feature (1041)..(1041): n is a, c, g, or t
  misc_feature (1044)..(1044): n is a, c, g, or t
  misc_feature (1053)..(1054): n is a, c, g, or t
  misc_feature (1058)..(1058): n is a, c, g, or t
  misc_feature (1072)..(1072): n is a, c, g, or t
  misc_feature (1074)..(1074): n is a, c, g, or t
  misc_feature (1077)..(1077): n is a, c, g, or t
  misc_feature (1082)..(1082): n is a, c, g, or t
  misc_feature (1085)..(1085): n is a, c, g, or t
  misc_feature (1088)..(1088): n is a, c, g, or t
  misc_feature (1098)..(1098): n is a, c, g, or t
  misc_feature (1101)..(1101): n is a, c, g, or t
  misc_feature (1103)..(1105): n is a, c, g, or t
  misc_feature (1112)..(1116): n is a, c, g, or t
  misc_feature (1118)..(1124): n is a, c, g, or t
  misc_feature (1134)..(1134): n is a, c, g, or t
  misc_feature (1137)..(1137): n is a, c, g, or t
  misc_feature (1142)..(1142): n is a, c, g, or t
  misc_feature (1144)..(1145): n is a, c, g, or t
  misc_feature (1151)..(1151): n is a, c, g, or t
  misc_feature (1154)..(1154): n is a, c, g, or t
  misc_feature (1157)..(1157): n is a, c, g, or t
  misc_feature (1160)..(1160): n is a, c, g, or t
  misc_feature (1167)..(1167): n is a, c, g, or t
  misc_feature (1181)..(1181): n is a, c, g, or t
  misc_feature (1183)..(1184): n is a, c, g, or t
  misc_feature (1189)..(1189): n is a, c, g, or t
  misc_feature (1192)..(1193): n is a, c, g, or t
  misc_feature (1198)..(1198): n is a, c, g, or t
  misc_feature (1200)..(1200): n is a, c, g, or t
tagagaaattactatgagaggatcgcatcaccatcaccatcacggatcctatttaggtgacactatagaatcgtcgacccacgcgtccgctcgcaggcaccatgactcctgtgaggatgcagcactccctggcaggtcagacctatgccgtgcccctcatccagccagacctgcggcgagaggaggccgtccagcagatggcggatgccctgcagtacctgcagaaggtctctggagacatcttcagcaggtagagcagagccggagccaggtgcaggccattggagagaaggtctccttggcccaggccaagattgagaagatcaagggcagcaagaaggccatcaaggtgttctccagtgccaagtaccctgctccagagcacctgcaggaatatggctccatcttcacgggcgcccaggaccctggcctgcagagacgcccccgccacaggatccagagcaagcaccgccccctggacgagcgggccctgcagccctcccaggagaagctgaaggaatttcctgtgtgcgtgagcaccaagccggagcccgaggacgatgcagaagagggacttgggggtcttcccagcaacatcagctctgtcagctccttgctgcttttcaacaccaccgagaacctgtagaagaagtatgtcttcctggaccccctggctggtgctgtaacaaagacccatgtgatgctgggggcagagacagaggagaagctgtttgatgcccccttgtccatcagcaagagagagcagctggaacagcaggtcccagagaactacttctatgtgccagacctgggccaggtgcctgagattgatgttccatcctacctgcctgacctgcccggcattgccaacgacctcatgtacattgccgacctgggcccggcattgccccctctgccccntggcaccattccaaaactgcccacnttccacactgaggtanccgancctctcaaggcanaactacaaatggggtantaanacaanccccaacgncccnanaanttncccaantttntganggngttgggcanngganccccaattccaacntnaanggggnccntgnaggcaagggnccngnnngaaaaannnnnannnnnnnttttctttantcngggantnnccaggnaanggntcnaccctcngggggtgggccctntnntaaanccnnccccnan

SEQ ID NO: 555 - DNA, 1200 bp, Homo Sapiens
  misc_feature (825)..(825): n is a, c, g, or t
  misc_feature (843)..(843): n is a, c, g, or t
  misc_feature (866)..(866): n is a, c, g, or t
  misc_feature (889)..(889): n is a, c, g, or t
  misc_feature (893)..(893): n is a, c, g, or t
  misc_feature (895)..(895): n is a, c, g, or t
  misc_feature (901)..(901): n is a, c, g, or t
  misc_feature (904)..(904): n is a, c, g, or t
  misc_feature (912)..(912): n is a, c, g, or t
  misc_feature (921)..(921): n is a, c, g, or t
  misc_feature (923)..(923): n is a, c, g, or t
  misc_feature (925)..(925): n is a, c, g, or t
  misc_feature (929)..(929): n is a, c, g, or t
  misc_feature (935)..(935): n is a, c, g, or t
  misc_feature (941)..(942): n is a, c, g, or t
  misc_feature (965)..(965): n is a, c, g, or t
  misc_feature (972)..(972): n is a, c, g, or t
  misc_feature (998)..(998): n is a, c, g, or t
  misc_feature (1003)..(1003): n is a, c, g, or t
  misc_feature (1027)..(1027): n is a, c, g, or t
  misc_feature (1032)..(1032): n is a, c, g, or t
  misc_feature (1034)..(1035): n is a, c, g, or t
  misc_feature (1041)..(1041): n is a, c, g, or t
  misc_feature (1044)..(1044): n is a, c, g, or t
  misc_feature (1046)..(1046): n is a, c, g, or t
  misc_feature (1050)..(1050): n is a, c, g, or t
  misc_feature (1054)..(1054): n is a, c, g, or t
  misc_feature (1056)..(1056): n is a, c, g, or t
  misc_feature (1063)..(1063): n is a, c, g, or t
  misc_feature (1065)..(1065): n is a, c, g, or t
  misc_feature (1068)..(1068): n is a, c, g, or t
  misc_feature (1071)..(1071): n is a, c, g, or t
  misc_feature (1075)..(1076): n is a, c, g, or t
  misc_feature (1078)..(1078): n is a, c, g, or t
  misc_feature (1083)..(1083): n is a, c, g, or t
  misc_feature (1099)..(1099): n is a, c, g, or t
  misc_feature (1104)..(1104): n is a, c, g, or t
  misc_feature (1107)..(1107): n is a, c, g, or t
  misc_feature (1110)..(1110): n is a, c, g, or t
  misc_feature (1113)..(1113): n is a, c, g, or t
  misc_feature (1115)..(1116): n is a, c, g, or t
  misc_feature (1119)..(1119): n is a, c, g, or t
  misc_feature (1123)..(1124): n is a, c, g, or t
  misc_feature (1128)..(1129): n is a, c, g, or t
  misc_feature (1133)..(1133): n is a, c, g, or t
  misc_feature (1136)..(1138): n is a, c, g, or t
  misc_feature (1144)..(1144): n is a, c, g, or t
  misc_feature (1147)..(1147): n is a, c, g, or t
  misc_feature (1150)..(1150): n is a, c, g, or t
  misc_feature (1153)..(1154): n is a, c, g, or t
  misc_feature (1157)..(1158): n is a, c, g, or t
  misc_feature (1160)..(1160): n is a, c, g, or t
  misc_feature (1166)..(1166): n is a, c, g, or t
  misc_feature (1168)..(1169): n is a, c, g, or t
  misc_feature (1172)..(1172): n is a, c, g, or t
  misc_feature (1176)..(1176): n is a, c, g, or t
  misc_feature (1178)..(1178): n is a, c, g, or t
  misc_feature (1183)..(1186): n is a, c, g, or t
  misc_feature (1189)..(1189): n is a, c, g, or t
  misc_feature (1191)..(1193): n is a, c, g, or t
  misc_feature (1195)..(1200): n is a, c, g, or t
tagaggaaattactatggagaggatcgcatcaccatcaccatcacggatcctatttaggtgacactatagaatcgtcgacccacgcgtccgatcaccagcagcatccacttcgaggcgtaccgtgtgaagcgcctcaacgagggcagcagcgccatggccaacggcgtggaggagaaggagccagaagccccggagatgtagacgccaccctgcccacccccgggatcctgcccccaagtcatttccgtcccccccccaggccctcccaccaccccattttattttatatgattttctccatttgtcatcgttccccaccccttcgacatgctgccaggaaacaagggaaggggcctccctccgagtgagtcagtgatgaggccgcggcctccccgaggttgtggggaggctgcactggagccacaggcaggggtgagagcacccactgaattgacatgaccctctgtccccaggcctggctccccgagggctcagaagagcagcttcggtgtgcagatcatccgtctgtgtggggttctcagtgccggaggccttggggtgggggccaggcctcgcacttgcagaggagcccagtgggctgcacgctcccctccatccccatcggccctgtcccctggagtgtgtcagagcccaggggagaatgcagcccaccaggagcacctggaccccctgcccgccacatggtgtggccatcactcagcccctacccctgccctgctcctaagggtagaaaactccagggtcccctgccaccgactgcccagccactccaagccccctggcagctgcccctcctggagcanaaagtgcctttatctcanccatccgcaaactgcttggccanatgcggggacaggctggaatganggangngtcttnatntccttggnatccccctntnangcanccccgnccccanngggctgcaggtgctgctgatgcnctggatntgattgaggataaaaaggaaggaaanatganccctacccctcatcccccattttnaaaangnntaaacnaantnaatntggngnagaactnanganggnaccnngnaaggnccaaaagaaagttggnggggnccntgnggncnnggntggnntggnnaaanggnnngaattnccnggnccnnccnngnccaatnannagnaaangnggggnnnnccngnnnannnnnn

SEQ ID NO: 556 - DNA, 1200 bp, Homo Sapiens
  misc_feature (1)..(1): n is a, c, g, or t
  misc_feature (4)..(4): n is a, c, g, or t
  misc_feature (822)..(822): n is a, c, g, or t
  misc_feature (881)..(881): n is a, c, g, or t
  misc_feature (889)..(889): n is a, c, g, or t
  misc_feature (966)..(966): n is a, c, g, or t
  misc_feature (988)..(988): n is a, c, g, or t
  misc_feature (1018)..(1018): n is a, c, g, or t
  misc_feature (1026)..(1026): n is a, c, g, or t
  misc_feature (1036)..(1037): n is a, c, g, or t
  misc_feature (1041)..(1085): n is a, c, g, or t
  misc_feature (1088)..(1088): n is a, c, g, or t
  misc_feature (1102)..(1102): n is a, c, g, or t
  misc_feature (1105)..(1105): n is a, c, g, or t
  misc_feature (1109)..(1109): n is a, c, g, or t
  misc_feature (1123)..(1127): n is a, c, g, or t
  misc_feature (1130)..(1130): n is a, c, g, or t
  misc_feature (1132)..(1132): n is a, c, g, or t
  misc_feature (1134)..(1134): n is a, c, g, or t
  misc_feature (1136)..(1137): n is a, c, g, or t
  misc_feature (1140)..(1140): n is a, c, g, or t
  misc_feature (1144)..(1144): n is a, c, g, or t
  misc_feature (1153)..(1154): n is a, c, g, or t
  misc_feature (1157)..(1157): n is a, c, g, or t
  misc_feature (1159)..(1159): n is a, c, g, or t
  misc_feature (1163)..(1163): n is a, c, g, or t
  misc_feature (1171)..(1171): n is a, c, g, or t
  misc_feature (1173)..(1173): n is a, c, g, or t
  misc_feature (1183)..(1183): n is a, c, g, or t
  misc_feature (1190)..(1191): n is a, c, g, or t
  misc_feature (1193)..(1193): n is a, c, g, or t
  misc_feature (1195)..(1195): n is a, c, g, or t
ntantagagaaattactatgagaggatcgcatcaccatcaccatcacggatcctatttaggtgacactatagaatcgtcgacccacgcgtccggggaagagtggtgtgggcaagacggcgctggtggccaagctggctggcctggaggtgcctgtggtgcaccacgagaccaccggcatccagaccaccgtggtattttggccagccaagctgcaggccagcagccgtgtcgtcatgtttcgttttgagttctgggactgtggagagtctgcactcaaaaagttcgatcatatgctgctggcttgcatggagaacacagatgccttcctcttcctcttctccttcactgaccgtgcctcctttgaagacctccctggacagctggcccgcatagcaggtgaggcccctggtgtcgtcaggatggtcatcggctccaaatttgaccagtacatgcacacggacgtgcccgagcgggacctcacagccttccggcaggcctgggagctgcccctgctacgggtgaagagtgtgccggggcggcggctggctgatgggcgcacactggacgggcgggctgggctggccgacgttgcccacatactcaatggccttgctgagcagctgtggcaccaggaccaggtggcggctggcctgcttcccaaccccccagagagtgctcctgaatgagtcacgagtggttgcctgtgatcccacccccaaccctcaggtctcgacatagggctggaggctggggcaggaacatggatcctatctggaggactggccagcatggcctgatcagggaggatgtggccagaaaangcccacccgcgagcagcgctttccttgcaaaattcatggcagggaggtggggaaccaangccctganctcgaacatctcccgtggcctttccccctttggcagcaccgatgaagatgactgggaaaaggggtgcctctcaagtnacttcaatcaaaaacctgtatnggttgaggtgaaaccatctgttgtaaaaanaaaccccnaattcccaannaaannnnnnnnnnnnnnnnnnnnnnnnnnnnnnnnnnnnnnnnnnnnnggnggccccccccaaanggngccnaataaacttaattnnnnnaantngnannccngttnaaaaatccnnaangncccnaaaccccncnggattttttnaaaaccnngntnccccc

SEQ ID NO: 557 - DNA, 1200 bp, Homo Sapiens
  misc_feature (99)..(99): n is a, c, g, or t
  misc_feature (104)..(105): n is a, c, g, or t
  misc_feature (119)..(119): n is a, c, g, or t
  misc_feature (123)..(123): n is a, c, g, or t
  misc_feature (129)..(129): n is a, c, g, or t
  misc_feature (131)..(131): n is a, c, g, or t
  misc_feature (147)..(147): n is a, c, g, or t
  misc_feature (149)..(150): n is a, c, g, or t
  misc_feature (182)..(182): n is a, c, g, or t
  misc_feature (185)..(185): n is a, c, g, or t
  misc_feature (209)..(209): n is a, c, g, or t
  misc_feature (214)..(214): n is a, c, g, or t
  misc_feature (219)..(219): n is a, c, g, or t
  misc_feature (227)..(227): n is a, c, g, or t
  misc_feature (237)..(237): n is a, c, g, or t
  misc_feature (241)..(242): n is a, c, g, or t
  misc_feature (247)..(247): n is a, c, g, or t
  misc_feature (256)..(256): n is a, c, g, or t
  misc_feature (262)..(262): n is a, c, g, or t
  misc_feature (270)..(270): n is a, c, g, or t
  misc_feature (272)..(272): n is a, c, g, or t
  misc_feature (277)..(278): n is a, c, g, or t
  misc_feature (281)..(281): n is a, c, g, or t
  misc_feature (296)..(296): n is a, c, g, or t
  misc_feature (300)..(300): n is a, c, g, or t
  misc_feature (306)..(306): n is a, c, g, or t
  misc_feature (311)..(313): n is a, c, g, or t
  misc_feature (315)..(315): n is a, c, g, or t
  misc_feature (319)..(320): n is a, c, g, or t
  misc_feature (329)..(331): n is a, c, g, or t
  misc_feature (348)..(348): n is a, c, g, or t
  misc_feature (357)..(357): n is a, c, g, or t
  misc_feature (365)..(367): n is a, c, g, or t
  misc_feature (370)..(370): n is a, c, g, or t
  misc_feature (376)..(376): n is a, c, g, or t
  misc_feature (384)..(384): n is a, c, g, or t
  misc_feature (388)..(389): n is a, c, g, or t
  misc_feature (393)..(393): n is a, c, g, or t
  misc_feature (397)..(397): n is a, c, g, or t
  misc_feature (401)..(401): n is a, c, g, or t
  misc_feature (403)..(404): n is a, c, g, or t
  misc_feature (408)..(408): n is a, c, g, or t
  misc_feature (410)..(410): n is a, c, g, or t
  misc_feature (416)..(416): n is a, c, g, or t
  misc_feature (419)..(419): n is a, c, g, or t
  misc_feature (421)..(422): n is a, c, g, or t
  misc_feature (424)..(424): n is a, c, g, or t
  misc_feature (427)..(428): n is a, c, g, or t
  misc_feature (434)..(434): n is a, c, g, or t
  misc_feature (438)..(438): n is a, c, g, or t
  misc_feature (445)..(445): n is a, c, g, or t
  misc_feature (452)..(452): n is a, c, g, or t
  misc_feature (457)..(457): n is a, c, g, or t
  misc_feature (459)..(459): n is a, c, g, or t
  misc_feature (461)..(461): n is a, c, g, or t
  misc_feature (463)..(471): n is a, c, g, or t
  misc_feature (486)..(486): n is a, c, g, or t
  misc_feature (494)..(495): n is a, c, g, or t
  misc_feature (505)..(505): n is a, c, g, or t
  misc_feature (509)..(510): n is a, c, g, or t
  misc_feature (512)..(514): n is a, c, g, or t
  misc_feature (516)..(517): n is a, c, g, or t
  misc_feature (520)..(520): n is a, c, g, or t
  misc_feature (525)..(527): n is a, c, g, or t
  misc_feature (531)..(532): n is a, c, g, or t
  misc_feature (539)..(539): n is a, c, g, or t
  misc_feature (546)..(547): n is a, c, g, or t
  misc_feature (551)..(551): n is a, c, g, or t
  misc_feature (556)..(556): n is a, c, g, or t
  misc_feature (563)..(563): n is a, c, g, or t
  misc_feature (565)..(567): n is a, c, g, or t
  misc_feature (573)..(573): n is a, c, g, or t
  misc_feature (577)..(577): n is a, c, g, or t
  misc_feature (579)..(579): n is a, c, g, or t
  misc_feature (583)..(583): n is a, c, g, or t
  misc_feature (585)..(585): n is a, c, g, or t
  misc_feature (587)..(587): n is a, c, g, or t
  misc_feature (589)..(590): n is a, c, g, or t
  misc_feature (602)..(603): n is a, c, g, or t
  misc_feature (608)..(608): n is a, c, g, or t
  misc_feature (611)..(613): n is a, c, g, or t
  misc_feature (615)..(615): n is a, c, g, or t
  misc_feature (623)..(625): n is a, c, g, or t
  misc_feature (628)..(630): n is a, c, g, or t
  misc_feature (634)..(636): n is a, c, g, or t
  misc_feature (640)..(640): n is a, c, g, or t
  misc_feature (642)..(643): n is a, c, g, or t
  misc_feature (645)..(647): n is a, c, g, or t
  misc_feature (649)..(649): n is a, c, g, or t
  misc_feature (651)..(652): n is a, c, g, or t
  misc_feature (655)..(655): n is a, c, g, or t
  misc_feature (657)..(658): n is a, c, g, or t
  misc_feature (662)..(662): n is a, c, g, or t
  misc_feature (664)..(666): n is a, c, g, or t
  misc_feature (668)..(668): n is a, c, g, or t
  misc_feature (673)..(673): n is a, c, g, or t
  misc_feature (684)..(684): n is a, c, g, or t
  misc_feature (692)..(692): n is a, c, g, or t
  misc_feature (702)..(702): n is a, c, g, or t
  misc_feature (705)..(705): n is a, c, g, or t
  misc_feature (712)..(713): n is a, c, g, or t
  misc_feature (715)..(715): n is a, c, g, or t
  misc_feature (721)..(721): n is a, c, g, or t
  misc_feature (723)..(723): n is a, c, g, or t
  misc_feature (728)..(728): n is a, c, g, or t
  misc_feature (743)..(743): n is a, c, g, or t
  misc_feature (749)..(749): n is a, c, g, or t
  misc_feature (752)..(753): n is a, c, g, or t
  misc_feature (756)..(756): n is a, c, g, or t
  misc_feature (768)..(768): n is a, c, g, or t
  misc_feature (775)..(775): n is a, c, g, or t
  misc_feature (781)..(781): n is a, c, g, or t
  misc_feature (784)..(784): n is a, c, g, or t
  misc_feature (800)..(800): n is a, c, g, or t
  misc_feature (808)..(808): n is a, c, g, or t
  misc_feature (815)..(815): n is a, c, g, or t
  misc_feature (827)..(827): n is a, c, g, or t
  misc_feature (833)..(833): n is a, c, g, or t
  misc_feature (841)..(841): n is a, c, g, or t
  misc_feature (843)..(843): n is a, c, g, or t
  misc_feature (848)..(848): n is a, c, g, or t
  misc_feature (851)..(851): n is a, c, g, or t
  misc_feature (855)..(855): n is a, c, g, or t
  misc_feature (857)..(857): n is a, c, g, or t
  misc_feature (862)..(862): n is a, c, g, or t
  misc_feature (869)..(872): n is a, c, g, or t
  misc_feature (883)..(883): n is a, c, g, or t
  misc_feature (888)..(888): n is a, c, g, or t
  misc_feature (897)..(897): n is a, c, g, or t
  misc_feature (900)..(900): n is a, c, g, or t
  misc_feature (918)..(918): n is a, c, g, or t
  misc_feature (922)..(922): n is a, c, g, or t
  misc_feature (927)..(927): n is a, c, g, or t
  misc_feature (934)..(934): n is a, c, g, or t
  misc_feature (937)..(937): n is a, c, g, or t
  misc_feature (940)..(940): n is a, c, g, or t
  misc_feature (945)..(945): n is a, c, g, or t
  misc_feature (951)..(952): n is a, c, g, or t
  misc_feature (955)..(955): n is a, c, g, or t
  misc_feature (959)..(959): n is a, c, g, or t
  misc_feature (969)..(969): n is a, c, g, or t
  misc_feature (982)..(982): n is a, c, g, or t
  misc_feature (985)..(988): n is a, c, g, or t
  misc_feature (1013)..(1013): n is a, c, g, or t
  misc_feature (1019)..(1019): n is a, c, g, or t
  misc_feature (1022)..(1022): n is a, c, g, or t
  misc_feature (1031)..(1032): n is a, c, g, or t
  misc_feature (1044)..(1044): n is a, c, g, or t
  misc_feature (1046)..(1047): n is a, c, g, or t
  misc_feature (1050)..(1050): n is a, c, g, or t
  misc_feature (1054)..(1054): n is a, c, g, or t
  misc_feature (1062)..(1062): n is a, c, g, or t
  misc_feature (1064)..(1064): n is a, c, g, or t
  misc_feature (1066)..(1066): n is a, c, g, or t
  misc_feature (1069)..(1069): n is a, c, g, or t
  misc_feature (1072)..(1072): n is a, c, g, or t
  misc_feature (1079)..(1079): n is a, c, g, or t
  misc_feature (1081)..(1081): n is a, c, g, or t
  misc_feature (1083)..(1083): n is a, c, g, or t
  misc_feature (1088)..(1090): n is a, c, g, or t
  misc_feature (1094)..(1096): n is a, c, g, or t
  misc_feature (1098)..(1098): n is a, c, g, or t
  misc_feature (1103)..(1103): n is a, c, g, or t
  misc_feature (1105)..(1105): n is a, c, g, or t
  misc_feature (1108)..(1108): n is a, c, g, or t
  misc_feature (1119)..(1119): n is a, c, g, or t
  misc_feature (1122)..(1125): n is a, c, g, or t
  misc_feature (1128)..(1128): n is a, c, g, or t
  misc_feature (1139)..(1142): n is a, c, g, or t
  misc_feature (1146)..(1146): n is a, c, g, or t
  misc_feature (1148)..(1148): n is a, c, g, or t
  misc_feature (1150)..(1150): n is a, c, g, or t
  misc_feature (1155)..(1155): n is a, c, g, or t
  misc_feature (1161)..(1161): n is a, c, g, or t
  misc_feature (1163)..(1163): n is a, c, g, or t
  misc_feature (1166)..(1167): n is a, c, g, or t
  misc_feature (1178)..(1181): n is a, c, g, or t
  misc_feature (1185)..(1185): n is a, c, g, or t
  misc_feature (1189)..(1191): n is a, c, g, or t
  misc_feature (1196)..(1196): n is a, c, g, or t
  misc_feature (1199)..(1199): n is a, c, g, or t
aaaatagagaaattactatgagaggatcgcatcaccatcaccatcacggatcctatttaggtgacactatagaatcgtcgacccacgcgtccgtgtctncctannacaagctcgagggnttgntcatcntngtggttccagcagatncnngccgccggcctgcctggtcaagggcatcatcntcnaggagaaggcgctgcacatagccnaaganctggncatggacnacttcaccgnctcnnacggntggatggancgcttncgccggcncnacagnntgntgtcctgcagcggcntgtnccgcgnccgcnnncnaaannctgcccccnnnaccccggcggcgcctgncagtccggncgcggtgnnntcngagggnactggcgngagnnctantggntggngnnctcntnaggagnagncnncntcnntggccnaggnctactcntctaagngacgngntnannnnnnnnnagaccagtctatganacaacttnntgacagaacntttnncnnngnngancggannngacnnatttccncatcganncacncagcncctgatngnnntgctangcgncnatgncnanannacctataagatnnccccnctnnngnccaggaannnggnnnaacnnngtananngnnngncnnccngnnctgntnnnanaccanctactccaaantgggtgtnaccacacaanccntgatctnntntttgangnacatntacacacaatggatnacatantcnnacnagtccctactgntatctgncagctntanaaccactcccatgganaacatgantctccgnaagggaatgtgnaaatcnttcctccngncaccntgntccncngatanctgtttnnnnaaaacatcttntaggntctaccaanagnttttgcattttaaaaaanttcngaatncatttgnaanaanactcnatcagnnaangggnaaaaccttanaatgtccctaacnttnnnnaccaagaataaaaaaatacttcggncttaanaanatttttccnnaaaatggaattncnnggnaaancccttggnancnatnaanttttctnantnaggannntttnnnantattntntcnggattaaaaanaannnntgnaaaaccccaannnnaggnantntaaanaaaaangnttnnaaaaaaaaatnnnnttgnaaannngtttnccna

SEQ ID NO: 558 - DNA, 1200 bp, Homo Sapiens
  misc_feature (2)..(3): n is a, c, g, or t
  misc_feature (532)..(532): n is a, c, g, or t
  misc_feature (597)..(597): n is a, c, g, or t
  misc_feature (631)..(631): n is a, c, g, or t
  misc_feature (686)..(686): n is a, c, g, or t
  misc_feature (737)..(737): n is a, c, g, or t
  misc_feature (754)..(754): n is a, c, g, or t
  misc_feature (759)..(759): n is a, c, g, or t
  misc_feature (762)..(762): n is a, c, g, or t
  misc_feature (771)..(771): n is a, c, g, or t
  misc_feature (784)..(784): n is a, c, g, or t
  misc_feature (788)..(788): n is a, c, g, or t
  misc_feature (797)..(797): n is a, c, g, or t
  misc_feature (802)..(802): n is a, c, g, or t
  misc_feature (810)..(810): n is a, c, g, or t
  misc_feature (820)..(821): n is a, c, g, or t
  misc_feature (824)..(824): n is a, c, g, or t
  misc_feature (827)..(827): n is a, c, g, or t
  misc_feature (829)..(830): n is a, c, g, or t
  misc_feature (835)..(835): n is a, c, g, or t
  misc_feature (837)..(837): n is a, c, g, or t
  misc_feature (839)..(839): n is a, c, g, or t
  misc_feature (850)..(851): n is a, c, g, or t
  misc_feature (853)..(854): n is a, c, g, or t
  misc_feature (856)..(859): n is a, c, g, or t
  misc_feature (867)..(867): n is a, c, g, or t
  misc_feature (870)..(870): n is a, c, g, or t
  misc_feature (872)..(872): n is a, c, g, or t
  misc_feature (876)..(876): n is a, c, g, or t
  misc_feature (881)..(882): n is a, c, g, or t
  misc_feature (884)..(884): n is a, c, g, or t
  misc_feature (891)..(895): n is a, c, g, or t
  misc_feature (897)..(897): n is a, c, g, or t
  misc_feature (900)..(902): n is a, c, g, or t
  misc_feature (904)..(904): n is a, c, g, or t
  misc_feature (919)..(919): n is a, c, g, or t
  misc_feature (923)..(923): n is a, c, g, or t
  misc_feature (929)..(929): n is a, c, g, or t
  misc_feature (931)..(931): n is a, c, g, or t
  misc_feature (937)..(937): n is a, c, g, or t
  misc_feature (940)..(941): n is a, c, g, or t
  misc_feature (949)..(950): n is a, c, g, or t
  misc_feature (955)..(955): n is a, c, g, or t
  misc_feature (960)..(964): n is a, c, g, or t
  misc_feature (969)..(977): n is a, c, g, or t
  misc_feature (980)..(980): n is a, c, g, or t
  misc_feature (989)..(990): n is a, c, g, or t
  misc_feature (993)..(993): n is a, c, g, or t
  misc_feature (995)..(996): n is a, c, g, or t
  misc_feature (999)..(1001): n is a, c, g, or t
  misc_feature (1004)..(1004): n is a, c, g, or t
  misc_feature (1006)..(1009): n is a, c, g, or t
  misc_feature (1012)..(1013): n is a, c, g, or t
  misc_feature (1016)..(1016): n is a, c, g, or t
  misc_feature (1020)..(1020): n is a, c, g, or t
  misc_feature (1022)..(1023): n is a, c, g, or t
  misc_feature (1026)..(1028): n is a, c, g, or t
  misc_feature (1031)..(1034): n is a, c, g, or t
  misc_feature (1037)..(1043): n is a, c, g, or t
  misc_feature (1045)..(1045): n is a, c, g, or t
  misc_feature (1047)..(1048): n is a, c, g, or t
  misc_feature (1050)..(1050): n is a, c, g, or t
  misc_feature (1053)..(1053): n is a, c, g, or t
  misc_feature (1057)..(1058): n is a, c, g, or t
  misc_feature (1061)..(1062): n is a, c, g, or t
  misc_feature (1065)..(1065): n is a, c, g, or t
  misc_feature (1067)..(1070): n is a, c, g, or t
  misc_feature (1072)..(1072): n is a, c, g, or t
  misc_feature (1074)..(1076): n is a, c, g, or t
  misc_feature (1079)..(1081): n is a, c, g, or t
  misc_feature (1083)..(1083): n is a, c, g, or t
  misc_feature (1089)..(1092): n is a, c, g, or t
  misc_feature (1097)..(1098): n is a, c, g, or t
  misc_feature (1101)..(1101): n is a, c, g, or t
  misc_feature (1105)..(1107): n is a, c, g, or t
  misc_feature (1110)..(1114): n is a, c, g, or t
  misc_feature (1116)..(1119): n is a, c, g, or t
  misc_feature (1123)..(1123): n is a, c, g, or t
  misc_feature (1125)..(1128): n is a, c, g, or t
  misc_feature (1130)..(1131): n is a, c, g, or t
  misc_feature (1135)..(1139): n is a, c, g, or t
  misc_feature (1143)..(1154): n is a, c, g, or t
  misc_feature (1156)..(1156): n is a, c, g, or t
  misc_feature (1160)..(1160): n is a, c, g, or t
  misc_feature (1162)..(1162): n is a, c, g, or t
  misc_feature (1164)..(1170): n is a, c, g, or t
  misc_feature (1172)..(1172): n is a, c, g, or t
  misc_feature (1175)..(1175): n is a, c, g, or t
  misc_feature (1177)..(1183): n is a, c, g, or t
  misc_feature (1185)..(1185): n is a, c, g, or t
  misc_feature (1187)..(1193): n is a, c, g, or t
  misc_feature (1195)..(1195): n is a, c, g, or t
  misc_feature (1197)..(1200): n is a, c, g, or t
anntagagagaattactatgagaggatcgcatcaccattcaccatcacggatcctatttaggtgacactatagaatcgtcgacccacgcgtccgagctcggtgcagaagcccagcagccggcgtgccgccgcccggccactccagcgccttcttccccgccttgcgctcctgccccaactcgcgctgtcgtcggaccccggcccatccagcagcgctcggcgcccaccaggcggacgcccaggagaacccctgcctccgtcgcggctcctggagagctgatcgttcacctgccccggcccgcctgaggacgggggtgccttcatgcggcccccacactcctcaccccgccgccgccgccgtccccgagctccgcacagtgcgccccagccccagcagggcgcacaactttggaagtctcgcggcgctccgagaggcggcagagtccgcgccccagccccgggccgggccgggccagaaccgcagcgtctgggggaagccagagagtcggtaatcgcttcggggatgtaaggngacagacataggacccccgagctcgcatcagcacccttcggctgcctcccggggtgggggcgggncccgcacacggtaagacctcttgctttcgctcangctcaagattcaagatacagatattgatatgtatatatatatttaatttcctgtnatccttccaagttatcaggccaccgatgatttttgttctcccttcttgaanaataaatctctctttanccatnggntctccctantctctcacgccgnttanaaataaaanttggntgtattangagctcgaannaanaangnncccancnanagcgtctgaanntnnannnnggaataanttngngggnacccnngncaatggnnnnntnagnnntncttccaattttgggncaanctttcntnttggtnccnntcctatgnnaaccntaatnnnnnaatgnnnnnnnnnaanaaaaaaaannaananntgnnnctngnnnnaannaantggnannagnnnaannnnaannnnnnncntnntnatntttnncannaanannnntngnnnaannnantttttnnnnaatgnnttnttannnaannnnnannnnattnannnnannaaannnnngggnnnnnnnnnnnntntttntntnnnnnnnanatnannnnnnntntnnnnnnntntnnnn

SEQ ID NO: 559 - DNA, 1200 bp, Homo Sapiens
  misc_feature (902)..(902): n is a, c, g, or t
  misc_feature (921)..(921): n is a, c, g, or t
  misc_feature (935)..(935): n is a, c, g, or t
  misc_feature (953)..(953): n is a, c, g, or t
  misc_feature (976)..(976): n is a, c, g, or t
  misc_feature (999)..(999): n is a, c, g, or t
  misc_feature (1004)..(1004): n is a, c, g, or t
  misc_feature (1032)..(1032): n is a, c, g, or t
  misc_feature (1052)..(1052): n is a, c, g, or t
  misc_feature (1076)..(1076): n is a, c, g, or t
  misc_feature (1082)..(1083): n is a, c, g, or t
  misc_feature (1085)..(1085): n is a, c, g, or t
  misc_feature (1101)..(1101): n is a, c, g, or t
  misc_feature (1111)..(1111): n is a, c, g, or t
  misc_feature (1117)..(1117): n is a, c, g, or t
  misc_feature (1125)..(1126): n is a, c, g, or t
  misc_feature (1131)..(1131): n is a, c, g, or t
  misc_feature (1135)..(1135): n is a, c, g, or t
  misc_feature (1138)..(1138): n is a, c, g, or t
  misc_feature (1144)..(1145): n is a, c, g, or t
  misc_feature (1154)..(1154): n is a, c, g, or t
  misc_feature (1156)..(1156): n is a, c, g, or t
  misc_feature (1167)..(1167): n is a, c, g, or t
  misc_feature (1177)..(1177): n is a, c, g, or t
  misc_feature (1180)..(1180): n is a, c, g, or t
  misc_feature (1187)..(1187): n is a, c, g, or t
  misc_feature (1194)..(1194): n is a, c, g, or t
  misc_feature (1200)..(1200): n is a, c, g, or t
aatagagaaattactatgagaggatcgcatcaccatcaccatcacggatcctatttaggtgacactatagaatcgtcgacccacgcgtccggatggccgtgcagagggaccttgcgccggggtgcctgggcacagtgccctggcaggggggctcctctcctgtctcctcaggtccagatcaaggaagagacccgcttggtgtctgtcattgaccagattgacaaggctgtggccatcatcccccgaggcgccctcttcaagaccccttttggacccacccatgtcaatcggacctttgaaggactgtccttgtctgaggccaagaagctcagctcctacttccatttcagggagcctgttgagctaaagaataagaccttgcttgagaaggctgacctggacccctccctggatttcatggactccttggagcatgacattcccaaagggtcctggagcatccagatggagaggggcaatgccctggtggtgctgcgcagcctgctctggccgggcctcaccttctaccatgctccccgcaccaagaactatggctacgtctacgtgggcactggcgagaagaacatggacttgcccttcatgctatagaatgggagccagcctggatgtttttaaacagagtctaaacatgattttcttaagcttcagtgaacttggcctgcctgttctgtcctatcttcttaactccacctccgtctggttccagattctgaaaggcccactgagccagggagctcatttctaaaccaagtggcagaggggttggaatgtgctaatgaaagagattctagacaacgatgggtggaaatggctgtgggagaaggtgacaaccagggcccctttgaggaacgcagtttcttggattcacacgaaagcggcangtgtgtcaggcagcccacnttggctccctgcanctctcccacagtaagganctcacagctgtcatgaaaaagangggacctgtttggcccatgaatncaatngactcatggccccatcacaaaaaatcantgactcatgctcaccaccanctggcatgtgccagaaccctgcanttccannangaacgcaacccatggnaacccagaanccattnaaaaatgnntgggnaaantcngtcccnnatgaaaggncnaacccaaaaantggaaggacnaangcctgcngcttaantccaan

SEQ ID NO: 560 - DNA, 1200 bp, Homo Sapiens
  misc_feature (129)..(129): n is a, c, g, or t
  misc_feature (171)..(171): n is a, c, g, or t
  misc_feature (227)..(227): n is a, c, g, or t
  misc_feature (277)..(277): n is a, c, g, or t
  misc_feature (289)..(289): n is a, c, g, or t
  misc_feature (442)..(442): n is a, c, g, or t
  misc_feature (468)..(468): n is a, c, g, or t
  misc_feature (645)..(645): n is a, c, g, or t
  misc_feature (665)..(665): n is a, c, g, or t
  misc_feature (672)..(672): n is a, c, g, or t
  misc_feature (714)..(714): n is a, c, g, or t
  misc_feature (835)..(835): n is a, c, g, or t
  misc_feature (887)..(887): n is a, c, g, or t
  misc_feature (946)..(946): n is a, c, g, or t
  misc_feature (955)..(955): n is a, c, g, or t
  misc_feature (960)..(960): n is a, c, g, or t
  misc_feature (1026)..(1026): n is a, c, g, or t
  misc_feature (1030)..(1030): n is a, c, g, or t
  misc_feature (1045)..(1045): n is a, c, g, or t
  misc_feature (1050)..(1050): n is a, c, g, or t
  misc_feature (1053)..(1053): n is a, c, g, or t
  misc_feature (1057)..(1057): n is a, c, g, or t
  misc_feature (1060)..(1060): n is a, c, g, or t
  misc_feature (1072)..(1072): n is a, c, g, or t
  misc_feature (1080)..(1081): n is a, c, g, or t
  misc_feature (1094)..(1094): n is a, c, g, or t
  misc_feature (1105)..(1105): n is a, c, g, or t
  misc_feature (1114)..(1114): n is a, c, g, or t
  misc_feature (1118)..(1118): n is a, c, g, or t
  misc_feature (1121)..(1121): n is a, c, g, or t
  misc_feature (1130)..(1131): n is a, c, g, or t
  misc_feature (1140)..(1140): n is a, c, g, or t
  misc_feature (1147)..(1147): n is a, c, g, or t
  misc_feature (1149)..(1149): n is a, c, g, or t
  misc_feature (1152)..(1154): n is a, c, g, or t
  misc_feature (1156)..(1156): n is a, c, g, or t
  misc_feature (1166)..(1168): n is a, c, g, or t
  misc_feature (1175)..(1175): n is a, c, g, or t
  misc_feature (1191)..(1191): n is a, c, g, or t
  misc_feature (1194)..(1195): n is a, c, g, or t
tagagaaattactatgagaggatcgcatcaccatcaccatcacggatcctatttaggtgacactatagaatcgtcgacccacgcgtccgcccacgcgtccgcccacgcggtccgcccacgcgctccggntgcagctcgggacttcggcctgacccagcccccatggcttcngaagagctacagaaagatctagaagaggtaaaggtgttgctggaaaaggctactangaaaagagtacgtgatgcccttacagctgaaaaatccaagattgagacanaaatcaagaacnagatgcaacagaaatcacagaagaaagcagaacttcttgataatgaaaaaccagctgctgtggttgctcccattacaacgggctatacggtgaaaatcagtaattatggatgggatcagtcagataagtttgtgaaaatctacattaccttanctggagttcatcaagttcccactganaatgtgcaggtgcatttcacagagaggtcatttgatcttttggtaaagaatctaaatgggaagagttactccatgattgtgaacaatctcttgaaacccatctctgtggaaggcagttcaaaaaaagtcaagactgatacagttcttatattgtgtagaaagaaagtggaaaacacnaggtgggattacctgacccnggttganaaggagtgcaaagaaaaagagaagccctcctatgacactgtnacagatcctagtgagggattgatgaatgttctaaagaaaatttatgaagatggagacgatgatatgaagcgaaccattaataaagcctgggtggaatcaagagagaagcacgccaaagganacacggaattttgagactttaaagtcgttttgggaactgtgatgtgatgtgnaatactgatgttttccagtaagggaatattggtgagctgcatatataaatttgacaganagctatttncctanccttctaagtaaggcaatgaattctcctttcctactggaggatttatttaataaaatatgcttatnaacnctcctgcaagaaggnttatnagnaccnggnccttttgttcangaaggttnnttgcttccccgtnaataaaaaacngtctgccanaaanccnacttggggnntttttttcnctaaatngnaannntngctggccttnnntacgccncccttccccaggaaantgnnaaccc

SEQ ID NO: 561 - DNA, 1200 bp, Homo Sapiens
  misc_feature (2)..(2): n is a, c, g, or t
  misc_feature (676)..(676): n is a, c, g, or t
  misc_feature (698)..(698): n is a, c, g, or t
  misc_feature (701)..(701): n is a, c, g, or t
  misc_feature (720)..(720): n is a, c, g, or t
  misc_feature (726)..(726): n is a, c, g, or t
  misc_feature (754)..(754): n is a, c, g, or t
  misc_feature (762)..(762): n is a, c, g, or t
  misc_feature (777)..(777): n is a, c, g, or t
  misc_feature (780)..(780): n is a, c, g, or t
  misc_feature (782)..(782): n is a, c, g, or t
  misc_feature (797)..(797): n is a, c, g, or t
  misc_feature (806)..(807): n is a, c, g, or t
  misc_feature (818)..(818): n is a, c, g, or t
  misc_feature (823)..(823): n is a, c, g, or t
  misc_feature (833)..(833): n is a, c, g, or t
  misc_feature (838)..(838): n is a, c, g, or t
  misc_feature (849)..(849): n is a, c, g, or t
  misc_feature (862)..(862): n is a, c, g, or t
  misc_feature (873)..(873): n is a, c, g, or t
  misc_feature (881)..(881): n is a, c, g, or t
  misc_feature (885)..(885): n is a, c, g, or t
  misc_feature (891)..(891): n is a, c, g, or t
  misc_feature (911)..(911): n is a, c, g, or t
  misc_feature (913)..(913): n is a, c, g, or t
  misc_feature (932)..(933): n is a, c, g, or t
  misc_feature (947)..(947): n is a, c, g, or t
  misc_feature (960)..(960): n is a, c, g, or t
  misc_feature (968)..(968): n is a, c, g, or t
  misc_feature (976)..(977): n is a, c, g, or t
  misc_feature (979)..(981): n is a, c, g, or t
  misc_feature (983)..(985): n is a, c, g, or t
  misc_feature (987)..(988): n is a, c, g, or t
  misc_feature (997)..(997): n is a, c, g, or t
  misc_feature (999)..(999): n is a, c, g, or t
  misc_feature (1001)..(1001): n is a, c, g, or t
  misc_feature (1008)..(1010): n is a, c, g, or t
  misc_feature (1013)..(1013): n is a, c, g, or t
  misc_feature (1015)..(1017): n is a, c, g, or t
  misc_feature (1027)..(1027): n is a, c, g, or t
  misc_feature (1033)..(1033): n is a, c, g, or t
  misc_feature (1036)..(1036): n is a, c, g, or t
  misc_feature (1038)..(1039): n is a, c, g, or t
  misc_feature (1041)..(1043): n is a, c, g, or t
  misc_feature (1047)..(1048): n is a, c, g, or t
  misc_feature (1052)..(1055): n is a, c, g, or t
  misc_feature (1058)..(1060): n is a, c, g, or t
  misc_feature (1064)..(1064): n is a, c, g, or t
  misc_feature (1066)..(1069): n is a, c, g, or t
  misc_feature (1076)..(1079): n is a, c, g, or t
  misc_feature (1081)..(1081): n is a, c, g, or t
  misc_feature (1083)..(1084): n is a, c, g, or t
  misc_feature (1087)..(1088): n is a, c, g, or t
  misc_feature (1090)..(1090): n is a, c, g, or t
  misc_feature (1092)..(1094): n is a, c, g, or t
  misc_feature (1098)..(1099): n is a, c, g, or t
  misc_feature (1105)..(1105): n is a, c, g, or t
  misc_feature (1108)..(1110): n is a, c, g, or t
  misc_feature (1112)..(1112): n is a, c, g, or t
  misc_feature (1115)..(1115): n is a, c, g, or t
  misc_feature (1117)..(1118): n is a, c, g, or t
  misc_feature (1120)..(1121): n is a, c, g, or t
  misc_feature (1123)..(1127): n is a, c, g, or t
  misc_feature (1130)..(1131): n is a, c, g, or t
  misc_feature (1134)..(1134): n is a, c, g, or t
  misc_feature (1140)..(1144): n is a, c, g, or t
  misc_feature (1147)..(1147): n is a, c, g, or t
  misc_feature (1151)..(1153): n is a, c, g, or t
  misc_feature (1156)..(1156): n is a, c, g, or t
  misc_feature (1161)..(1164): n is a, c, g, or t
  misc_feature (1167)..(1175): n is a, c, g, or t
  misc_feature (1178)..(1183): n is a, c, g, or t
  misc_feature (1187)..(1192): n is a, c, g, or t
  misc_feature (1196)..(1200): n is a, c, g, or t
antagagaaattactatgagaggatcgcatcaccatcaccatcacggatcctatttaggtgacactatagaatcgtcgacccacgcgtccggcggctggagcaggcgagcggcggcggccgatagcgagtgtcagggacggccggggccggggctgcggcgggccggccggggcggcgcttctcggcctgtcgctggtcggcctcctactgtacctcgtgcctgctgcggctgcgctggcctggctggccgtggggactaccgcggcctggtggggactgagcagcgagccccgaggttcgcgccccttgtcctccttcgttcagaaggcgcgacatcggcgaacactgttcgcttcgcctccggccaagtcgacagccaacggaaacctcctagagccgcggaccctgctcgaaggacctgaccctgccgaactgctcctcatgggcagttacctgggcaagcccgggccgccgcagcccgcccccgctccggagggccaggacctgcggaataggcctggccgccgcccgcccgcccggcgccgcgctccacaccgccctccacaccgccctccccgccgacccatcgcgttcaccacttttacccctctctccccactcctcttctccgaccctccgggaggccttccccacgggatcgtgggactttaccanatcggtttgtaataacacctcnaanacgctatccgatccatcangcccantattcctgtctgggggtacttctcacantgtgctgnaatggttatcacaanaangntgtgctgtcccctcncaactccannatggtgtgtancccantgactctgangatcncccctcctganaaaaaaattttcncgttctgcaanaccaaaanaaanaatcantcaaaatgtcctcaccatcnantaatgccccaaaccctgtnnaaaagaaaatgtantgatgccctcaanaaaaaaanaaaaaaannannntnnnannaaaaaaacnantnttccttnnntgncnnnaaaataaaanaaaacnaantnnannntttnnccannnnaannnaaangnnnnaattttnnnntnannaanntntnnnttcnnaaattnaannnanttntnntnncnnnnnccnnccnaaaaannnnnatnaaannnttnttttnnnnaannnnnnnnnaannnnnntttnnnnnnaaannnnn

SEQ ID NO: 562 - DNA, 1200 bp, Homo Sapiens
  misc_feature (820)..(820): n is a, c, g, or t
  misc_feature (842)..(842): n is a, c, g, or t
  misc_feature (875)..(875): n is a, c, g, or t
  misc_feature (900)..(900): n is a, c, g, or t
  misc_feature (909)..(909): n is a, c, g, or t
  misc_feature (928)..(928): n is a, c, g, or t
  misc_feature (936)..(936): n is a, c, g, or t
  misc_feature (939)..(939): n is a, c, g, or t
  misc_feature (941)..(941): n is a, c, g, or t
  misc_feature (949)..(949): n is a, c, g, or t
  misc_feature (959)..(959): n is a, c, g, or t
  misc_feature (964)..(964): n is a, c, g, or t
  misc_feature (981)..(981): n is a, c, g, or t
  misc_feature (992)..(992): n is a, c, g, or t
  misc_feature (1000)..(1001): n is a, c, g, or t
  misc_feature (1014)..(1015): n is a, c, g, or t
  misc_feature (1017)..(1017): n is a, c, g, or t
  misc_feature (1023)..(1023): n is a, c, g, or t
  misc_feature (1026)..(1026): n is a, c, g, or t
  misc_feature (1041)..(1042): n is a, c, g, or t
  misc_feature (1045)..(1045): n is a, c, g, or t
  misc_feature (1048)..(1048): n is a, c, g, or t
  misc_feature (1054)..(1054): n is a, c, g, or t
  misc_feature (1060)..(1063): n is a, c, g, or t
  misc_feature (1065)..(1066): n is a, c, g, or t
  misc_feature (1069)..(1069): n is a, c, g, or t
  misc_feature (1072)..(1072): n is a, c, g, or t
  misc_feature (1082)..(1083): n is a, c, g, or t
  misc_feature (1087)..(1087): n is a, c, g, or t
  misc_feature (1090)..(1091): n is a, c, g, or t
  misc_feature (1099)..(1099): n is a, c, g, or t
  misc_feature (1109)..(1109): n is a, c, g, or t
  misc_feature (1115)..(1115): n is a, c, g, or t
  misc_feature (1122)..(1124): n is a, c, g, or t
  misc_feature (1126)..(1126): n is a, c, g, or t
  misc_feature (1129)..(1129): n is a, c, g, or t
  misc_feature (1132)..(1132): n is a, c, g, or t
  misc_feature (1134)..(1134): n is a, c, g, or t
  misc_feature (1139)..(1139): n is a, c, g, or t
  misc_feature (1143)..(1144): n is a, c, g, or t
  misc_feature (1150)..(1150): n is a, c, g, or t
  misc_feature (1156)..(1156): n is a, c, g, or t
  misc_feature (1161)..(1161): n is a, c, g, or t
  misc_feature (1163)..(1163): n is a, c, g, or t
  misc_feature (1171)..(1172): n is a, c, g, or t
  misc_feature (1174)..(1174): n is a, c, g, or t
  misc_feature (1176)..(1176): n is a, c, g, or t
  misc_feature (1178)..(1179): n is a, c, g, or t
  misc_feature (1181)..(1181): n is a, c, g, or t
  misc_feature (1185)..(1186): n is a, c, g, or t
  misc_feature (1190)..(1190): n is a, c, g, or t
  misc_feature (1200)..(1200): n is a, c, g, or t
tagagaaattactatgagaggatcgcatcaccattcaccatcacggatcctatttaggtgacactatagaatcgtcgacccacgcgtccgcgctccgggagctgccgacggacggagcgcccccgcccccgcccggccgcccgcccgccgccgccatgcccttctccaacagccacaacgcactgaagctgcgcttcccggccgaggacgagttccccgacctgagcgcccacaacaaccacatggccaaggtgctgacccccgagctgtacgcggagctgcgcgccaagagcacgccgagcggcttcacgctggacgacgtcatccagacaggcgtggacaacccgggccacccgtacatcatgaccgtgggctgcgtggcgggcgacgaggagtcctacgaagtgttcaaggatctcttcgaccccatcatcgaggaccggcacggcggctacaagcccagcgatgagcacaagaccgacctcaaccccgaggtggggcacgggggcgggcgggtccgcgctgcgggctggaggggcgggcgcgggagccgagcgtcctgagcgcacccctcgcagccctgtccagcctggacggcgacctggcgggccgatactacgcgctcaagagcatgacggaggcggagcagcagcagctcatcgacgaccacttcctcttcgacaagcccgtgtcgcccctgctgctggcctcgggcatggcccgcgactggcccgacgcccgcggtatctggcacaatgacaataagaccttcctggtgtgggtcaacgaggaggaccacctgcgggtcatctccatgcanaagggggggcaacatgaaggangtgttcacccgcttctgcaccggcctcacccanattgaaactctctttcaagtctaangactatganttcatgtggaaccttcacntgggctanatncntcacctgnccatccaacntgggnaccggggctgcgggcangtgtgcatatnaagctgcnnaacctggggcaannanaaaaanttntcggaggtgcttaannggntgnaatttnaaaaannnngnnaanggnggtgtggaanncggnttnngggggggnggggtttttnaagttntccaaannntnaancgncntgggntttnnaaaagnggaaanttggntnaaaaaggnngngnanngnaatnnaaantttttttttn

SEQ ID NO: 563 - DNA, 1200 bp, Homo Sapiens
  misc_feature (894)..(894): n is a, c, g, or t
  misc_feature (939)..(939): n is a, c, g, or t
  misc_feature (950)..(950): n is a, c, g, or t
  misc_feature (1023)..(1023): n is a, c, g, or t
  misc_feature (1025)..(1025): n is a, c, g, or t
  misc_feature (1030)..(1030): n is a, c, g, or t
  misc_feature (1044)..(1044): n is a, c, g, or t
  misc_feature (1057)..(1057): n is a, c, g, or t
  misc_feature (1064)..(1064): n is a, c, g, or t
  misc_feature (1067)..(1067): n is a, c, g, or t
  misc_feature (1072)..(1072): n is a, c, g, or t
  misc_feature (1080)..(1080): n is a, c, g, or t
  misc_feature (1084)..(1084): n is a, c, g, or t
  misc_feature (1087)..(1087): n is a, c, g, or t
  misc_feature (1093)..(1093): n is a, c, g, or t
  misc_feature (1104)..(1104): n is a, c, g, or t
  misc_feature (1112)..(1112): n is a, c, g, or t
  misc_feature (1122)..(1122): n is a, c, g, or t
  misc_feature (1143)..(1143): n is a, c, g, or t
  misc_feature (1145)..(1145): n is a, c, g, or t
  misc_feature (1147)..(1147): n is a, c, g, or t
  misc_feature (1152)..(1152): n is a, c, g, or t
  misc_feature (1156)..(1156): n is a, c, g, or t
  misc_feature (1158)..(1160): n is a, c, g, or t
  misc_feature (1163)..(1163): n is a, c, g, or t
  misc_feature (1167)..(1167): n is a, c, g, or t
  misc_feature (1174)..(1174): n is a, c, g, or t
  misc_feature (1176)..(1176): n is a, c, g, or t
  misc_feature (1184)..(1184): n is a, c, g, or t
  misc_feature (1191)..(1191): n is a, c, g, or t
  misc_feature (1194)..(1194): n is a, c, g, or t
  misc_feature (1199)..(1199): n is a, c, g, or t
tagagaaaattactatggagaggatcgcatcaccatcaccatcacggatcctatttaggtgacactatagaatcgtcgacccacgcgtccgagctgttagaaggttacctcaaagaaattggaattaatgaagatcaatttcaagaagcatgcacttctcctcttgcaaagacccatacatcacaggccattttgcaacctgtgttggcagcagaagattttactatctttaaagcaatgatggtccagaaaaacattgaaatgcagctgcaagccattcgaataattcaagagagaaatggtgtattacctgactgcttaaccgatggctctgatgtggtcagtgaccttgaacacgaagagatgaaaatcctgagggaagttcttagaaaatcaaaagaggaatatgaccaggaagaagaaaggaagaggaaaaaacagttatcagaggctaaaacagaagagcccacagtgcattccagtgaagctgcaataatgaataattcccaaggggatggtgaacattttgcacacccaccctcagaagttaaaatgcattttgctaatcagtcaatagaacctttgggaagaaaagtggaaaggtctgaaacttcctccctcccacaaaaaggcctgaagattcctggcttagagcatgcgagcattgaaggaccaatagcaaacttatcagtacttggaacagaagaacttcggcaacgagaacactatctcaagcagaagagagataagttgatgtccatgagaaaggatatgaggactaaacagatacaaaatatggagcagaaaggaaaacccactggggaggtagaggaaaatgacagagaaaccagaaatgacagcagaggagaagccaacattactaaagaggagatngcttgcagagaactcaagaagaagttattaataagtaataattangaccatttacnaaatggaagttcaattgtcttaaaataattattagtccttaaaaaaaaaaaaaaaaaaaaaaaaagggcggcncnccctnagggggcctattancctaattactganctggacnccngtganaatcccgnaagnccncaaacncccctggattnttcaaacncccggtgccnccggggtttttttgggaaaancnanctacntggngnnnttncggncctaagnanctaaaggnaaaaaanccnggaanc

SEQ ID NO: 564 - DNA, 1200 bp, Homo Sapiens
  misc_feature (1)..(1): n is a, c, g, or t
  misc_feature (883)..(883): n is a, c, g, or t
  misc_feature (915)..(915): n is a, c, g, or t
  misc_feature (944)..(944): n is a, c, g, or t
  misc_feature (946)..(946): n is a, c, g, or t
  misc_feature (950)..(950): n is a, c, g, or t
  misc_feature (967)..(967): n is a, c, g, or t
  misc_feature (975)..(975): n is a, c, g, or t
  misc_feature (987)..(988): n is a, c, g, or t
  misc_feature (1000)..(1000): n is a, c, g, or t
  misc_feature (1012)..(1012): n is a, c, g, or t
  misc_feature (1015)..(1015): n is a, c, g, or t
  misc_feature (1032)..(1032): n is a, c, g, or t
  misc_feature (1037)..(1040): n is a, c, g, or t
  misc_feature (1051)..(1051): n is a, c, g, or t
  misc_feature (1054)..(1055): n is a, c, g, or t
  misc_feature (1058)..(1058): n is a, c, g, or t
  misc_feature (1067)..(1067): n is a, c, g, or t
  misc_feature (1079)..(1079): n is a, c, g, or t
  misc_feature (1093)..(1093): n is a, c, g, or t
  misc_feature (1102)..(1102): n is a, c, g, or t
  misc_feature (1104)..(1104): n is a, c, g, or t
  misc_feature (1133)..(1133): n is a, c, g, or t
  misc_feature (1158)..(1158): n is a, c, g, or t
  misc_feature (1160)..(1160): n is a, c, g, or t
  misc_feature (1162)..(1162): n is a, c, g, or t
  misc_feature (1166)..(1166): n is a, c, g, or t
  misc_feature (1170)..(1170): n is a, c, g, or t
  misc_feature (1176)..(1176): n is a, c, g, or t
  misc_feature (1186)..(1186): n is a, c, g, or t
  misc_feature (1190)..(1190): n is a, c, g, or t
  misc_feature (1194)..(1195): n is a, c, g, or t
naaaagagaaattactatgagaggatcgcatcaccatcaccatcacggatcctatttaggtgacactatagaatcgtcgacccacgcgtccggcctgagcctgagcctgagcccgagccgggagccggtcgcgggggctccgggctgtgggaccgctgggcccccagcgatggcgaccctgtggggaggccttcttcggcttggctccttgctcagcctgtcgtgcctggcgctttccgtgctgctgctggcgcagctgtcagacgccgccaagaatttcgaggatgtcagatgtaaatgtatctgccctccctataaagaaaattctgggcatatttataataagaacatatctcagaaagattgtgattgccttcatgtcgtggagcccatgcctgtgcgggggcctgatgtagaagcatactgtctacgctgtgaatgcaaatatgaagaaagaagctctgtcacaatcaaggttaccattataatttatctctccattttgggccttctacttctgtacatggtatatcttactctggttgagcccatactgaagaggcgcctctttggacatgcacagttgatacagagtgatgatgatattggggatcaccagccttttgcaaatgcacacgatgtgctagcccgctcccgcagtcgagccaacgtgctgaacaaggtagaatatgcacagcagcgctggaagcttcaagtccaagagcagcgaaagtctgtctttgaccggcatgttgtcctcagctaattgggaattgaattcaaggtgactagaaagaaacaggcagacaactggaaagaactgactgggttttgctgggtttcattttaataccttgttgatttcaccaactgttgctggaanaatcaaaactggaagcaaaaaacttgcttgantttttttttcttgttaacgtaataaaaananaaantttttaaaagcccacanctcaaagncagcccaaaaannccttttccctantttgggactttnacnaaaaaaaaaaaaaatcntgccnnnnaaattatcttngannccntttacctgnaaaaagcccctnctttttttcccccnaaaattttnancttgactttcaaaaaaaattttccggggnttttgggggggggtggttttttggntngnttgntttngggggnaaaagggaangaancccnnggaaa

SEQ ID NO: 565 - DNA, 1200 bp, Homo Sapiens
  misc_feature (10)..(10): n is a, c, g, or t
  misc_feature (931)..(931): n is a, c, g, or t
  misc_feature (965)..(965): n is a, c, g, or t
  misc_feature (968)..(968): n is a, c, g, or t
  misc_feature (972)..(972): n is a, c, g, or t
  misc_feature (975)..(975): n is a, c, g, or t
  misc_feature (979)..(979): n is a, c, g, or t
  misc_feature (991)..(991): n is a, c, g, or t
  misc_feature (1015)..(1015): n is a, c, g, or t
  misc_feature (1020)..(1020): n is a, c, g, or t
  misc_feature (1022)..(1022): n is a, c, g, or t
  misc_feature (1026)..(1027): n is a, c, g, or t
  misc_feature (1041)..(1041): n is a, c, g, or t
  misc_feature (1047)..(1047): n is a, c, g, or t
  misc_feature (1059)..(1061): n is a, c, g, or t
  misc_feature (1064)..(1064): n is a, c, g, or t
  misc_feature (1078)..(1078): n is a, c, g, or t
  misc_feature (1083)..(1084): n is a, c, g, or t
  misc_feature (1091)..(1091): n is a, c, g, or t
  misc_feature (1097)..(1098): n is a, c, g, or t
  misc_feature (1103)..(1103): n is a, c, g, or t
  misc_feature (1109)..(1109): n is a, c, g, or t
  misc_feature (1113)..(1113): n is a, c, g, or t
  misc_feature (1124)..(1124): n is a, c, g, or t
  misc_feature (1127)..(1127): n is a, c, g, or t
  misc_feature (1133)..(1133): n is a, c, g, or t
  misc_feature (1138)..(1138): n is a, c, g, or t
  misc_feature (1145)..(1146): n is a, c, g, or t
  misc_feature (1151)..(1152): n is a, c, g, or t
  misc_feature (1154)..(1154): n is a, c, g, or t
  misc_feature (1156)..(1156): n is a, c, g, or t
  misc_feature (1162)..(1162): n is a, c, g, or t
  misc_feature (1165)..(1165): n is a, c, g, or t
  misc_feature (1175)..(1175): n is a, c, g, or t
  misc_feature (1179)..(1179): n is a, c, g, or t
  misc_feature (1181)..(1181): n is a, c, g, or t
  misc_feature (1185)..(1185): n is a, c, g, or t
  misc_feature (1190)..(1190): n is a, c, g, or t
  misc_feature (1194)..(1196): n is a, c, g, or t
  misc_feature (1198)..(1199): n is a, c, g, or t
gagaaattanctatgagaggatcgcatcaccatcaccatcacggatcctatttaggtgacactatagaatcgtcgacccacgcgtccgggagaatggagaccaaacctgtgataacctgtctcaaaaccctcctcatcatctactccttcgtcttctggatcactggggtgatcctgctggctgttggagtctggggcaaacttactctgggcacctatatctcccttattgccgagaactccacaaatgctccctatgtgctcatcggaactggcaccactattgttgtctttggcctgtttggatgctttgctacatgtcgtggtagcccatggatgctgaaactgtatgccatgtttctgtccctggtgttcctggctgagctcgtagctggcatttcagggtttgtgtttcgtcatgagatcaaggacaccttcctgaggacttacacggacgctatgcagacttacaatggcaatgatgagaggagccgggcagtggaccatgtgcagcgcagcctgagctgctgtggtgtgcagaactacaccaactggagcaccagcccctacttcctggagcatggcatcccccccagctgctgcatgaacgaaactgattgtaatccccaggatctacacaatctgactgtggccgccaccaaagttaaccagaagggttgttatgatctggtaactagtttcatggagactaacatgggaatcatcgctggagtggcgtttggaatcgcattctcccagttaattggcatgctgctggcctgctgtctgtcccggttcatcacggccaatcagtatgagatggtgtaaggagaagtctttcaagaatgacggaataagagacctgttttaaaaaaggaactgcagcaatctttgaaaaacttccaaagaatgtaaaagcacagtacataanacacttgccctgctccctctcccccttaacccanaangtgnaantganactcccacccantctctgctccacctttcagcccangtcangngtanngtccattttggaanccctgntgggccaaaaannnaanccaggtccccctgnactanncctaaanaacctnnccccnaggccnggangggcccccccnccnttgganttggnccaatgnnaaccnncncngggaanggntacaaccccncccngncccnttggncccnnnanna

SEQ ID NO: 566 - DNA, 1200 bp, Homo Sapiens
  misc_feature (65)..(65): n is a, c, g, or t
  misc_feature (874)..(874): n is a, c, g, or t
  misc_feature (886)..(886): n is a, c, g, or t
  misc_feature (905)..(905): n is a, c, g, or t
  misc_feature (921)..(921): n is a, c, g, or t
  misc_feature (926)..(926): n is a, c, g, or t
  misc_feature (933)..(933): n is a, c, g, or t
  misc_feature (950)..(950): n is a, c, g, or t
  misc_feature (1008)..(1008): n is a, c, g, or t
  misc_feature (1030)..(1030): n is a, c, g, or t
  misc_feature (1039)..(1039): n is a, c, g, or t
  misc_feature (1051)..(1051): n is a, c, g, or t
  misc_feature (1055)..(1055): n is a, c, g, or t
  misc_feature (1079)..(1079): n is a, c, g, or t
  misc_feature (1090)..(1090): n is a, c, g, or t
  misc_feature (1093)..(1093): n is a, c, g, or t
  misc_feature (1097)..(1097): n is a, c, g, or t
  misc_feature (1108)..(1108): n is a, c, g, or t
  misc_feature (1110)..(1110): n is a, c, g, or t
  misc_feature (1114)..(1114): n is a, c, g, or t
  misc_feature (1116)..(1116): n is a, c, g, or t
  misc_feature (1125)..(1125): n is a, c, g, or t
  misc_feature (1127)..(1127): n is a, c, g, or t
  misc_feature (1133)..(1133): n is a, c, g, or t
  misc_feature (1138)..(1138): n is a, c, g, or t
  misc_feature (1145)..(1145): n is a, c, g, or t
  misc_feature (1154)..(1154): n is a, c, g, or t
  misc_feature (1158)..(1158): n is a, c, g, or t
  misc_feature (1172)..(1172): n is a, c, g, or t
  misc_feature (1187)..(1187): n is a, c, g, or t
  misc_feature (1191)..(1191): n is a, c, g, or t
  misc_feature (1196)..(1196): n is a, c, g, or t
  misc_feature (1198)..(1198): n is a, c, g, or t
  misc_feature (1200)..(1200): n is a, c, g, or t
gagaaattactatgagaggatcgcatcaccatcaccatcacggatcctatttaggtgacactatngaatcgtcgacccacgcgtccgctgaggctttagtcaacaatcccaaaattgaagtaatagatgggaagtatgctttcaagcccaagtacaacgtgagagataagaaggccctacttaggctcttagatcagcatgaccagcgaggattaggaggaattcttttagaagacatagaagaagcactgcccaattcccagaaagctgtcaaggctttgggggaccagatactatttgtaaatcgtcccgataagaagaaaatacttttcttcaatgataagagctgtcagttttctgtggatgaagaatttcagaaactgtggaggagtgtcactgtagattccatggacgaggagaaaattgaagaatatctgaagcgacagggtatttcttccatgcaggaatctggaccaaagaaagtggcccctattcagagaaggaaaaagcctgcttcacagaaaaagcgacgctttaagactcataacgaacacttggctggagtgctgaaggattactctgacattacttccagcaaatagggaacagttttgccctggaacagagttacagatacacaatcaagagtgttcttgctgatgctcggggtctgaagactgtcttcctatctgcttcttgcggctgaggagaggagcagttcagtttacaaaacaagtgcaaattaccaaactcaaagcttatttgagtagaatgggctcatgggcaatgtgatgttccctgttaaccttctgttactccctgggagaaaggcgctgagcgtggcatgcaggtgtctttgctgtgtttttctccncttctaaatggntcctggttcctttcttccncgtttggttactttanagcangttttgncccatagtcttgaatgncaatattttgtttattccaaaagaacatattttttaataaaatccctggtaaaaaggnaaaaaaaaaaaaaaaaaaaaanggggggccncccccctaaagngggnccgaattaagcttaattaacttgnaccttgggacnccnggtngaaaaatcccngnaaangncccccaaancnccctcngggantttttcnaaaaccccncggnttgcccccgggggnttttttttggggggnaaancccancntn

SEQ ID NO: 567 - DNA, 1200 bp, Homo Sapiens
  misc_feature (1)..(1): n is a, c, g, or t
  misc_feature (789)..(789): n is a, c, g, or t
  misc_feature (794)..(794): n is a, c, g, or t
  misc_feature (813)..(813): n is a, c, g, or t
  misc_feature (860)..(860): n is a, c, g, or t
  misc_feature (872)..(872): n is a, c, g, or t
  misc_feature (881)..(881): n is a, c, g, or t
  misc_feature (932)..(932): n is a, c, g, or t
  misc_feature (952)..(952): n is a, c, g, or t
  misc_feature (970)..(970): n is a, c, g, or t
  misc_feature (984)..(984): n is a, c, g, or t
  misc_feature (993)..(993): n is a, c, g, or t
  misc_feature (1009)..(1009): n is a, c, g, or t
  misc_feature (1016)..(1016): n is a, c, g, or t
  misc_feature (1026)..(1026): n is a, c, g, or t
  misc_feature (1028)..(1029): n is a, c, g, or t
  misc_feature (1033)..(1033): n is a, c, g, or t
  misc_feature (1038)..(1038): n is a, c, g, or t
  misc_feature (1044)..(1044): n is a, c, g, or t
  misc_feature (1050)..(1050): n is a, c, g, or t
  misc_feature (1054)..(1054): n is a, c, g, or t
  misc_feature (1061)..(1061): n is a, c, g, or t
  misc_feature (1071)..(1071): n is a, c, g, or t
  misc_feature (1075)..(1075): n is a, c, g, or t
  misc_feature (1079)..(1080): n is a, c, g, or t
  misc_feature (1085)..(1085): n is a, c, g, or t
  misc_feature (1092)..(1092): n is a, c, g, or t
  misc_feature (1096)..(1096): n is a, c, g, or t
  misc_feature (1100)..(1100): n is a, c, g, or t
  misc_feature (1103)..(1103): n is a, c, g, or t
  misc_feature (1105)..(1107): n is a, c, g, or t
  misc_feature (1109)..(1109): n is a, c, g, or t
  misc_feature (1111)..(1113): n is a, c, g, or t
  misc_feature (1118)..(1118): n is a, c, g, or t
  misc_feature (1120)..(1121): n is a, c, g, or t
  misc_feature (1134)..(1134): n is a, c, g, or t
  misc_feature (1137)..(1137): n is a, c, g, or t
  misc_feature (1143)..(1143): n is a, c, g, or t
  misc_feature (1145)..(1145): n is a, c, g, or t
  misc_feature (1151)..(1151): n is a, c, g, or t
  misc_feature (1158)..(1159): n is a, c, g, or t
  misc_feature (1162)..(1165): n is a, c, g, or t
  misc_feature (1167)..(1169): n is a, c, g, or t
  misc_feature (1175)..(1175): n is a, c, g, or t
  misc_feature (1178)..(1178): n is a, c, g, or t
  misc_feature (1182)..(1183): n is a, c, g, or t
  misc_feature (1185)..(1188): n is a, c, g, or t
  misc_feature (1197)..(1197): n is a, c, g, or t
naattagagaaattactatgagaggatcgcatcaccatcaccatcacggatcctatttaggtgacactatagaatcgtcgacccacgcgtccgaggcagtcagcgaggcccaggagaaattgacagaatccaaccagaagctggggctgctgcgggaggctctggagcggagacttggggagctgcccgccgaccaccccaaggggcggctgctgcgagaagagctcgctgcggcctcctccgctgccttcagcacccgcctggccgggccctttcccgccacgcactacagcaccctgtgcaagcccgcgccgctcacagggaccctggaggtacgagtggtgggctgcagagacctcccagagaccatcccgtggaaccctaccccctcaatggggggacctgggaccccagacagccgcccccccttcctgagccgcccagcccggggcctttacagccgaagcggaagcctcagtggccggagcagcctcaaagcagaagccgagaacaccagtcaccttccgcaaccctgtcattgagaggattcctcggctccgacggcagaagaaaattttctccaagcagcaagggaaggcgttccagcgtgctaggcagatgaacatcgatgtcgccacgtgggtgcggctgctccggaggctcatccccaatgccacgggcacaggcacctttagccctggggcttctccaggatccgaggcccggaccacgggtgacatatcggtggagaagctgaacctcggcactgactcggacagctcacctcanaaganctcgcgggatcctccttcnagcccatcgagcctgagctccccatccaggaatccactgctcccganctgccttcgganacccagganacccaggccccgccctgtgcagccctctgagaaagtcacctctgaccctcnaaaattttcaagttcctggnggtgctggggccggggtnattttgggaaaggngctcctttnccaaattccggcccantgggganctgttccccntnnaggnttttnaaaaangggaantttntggcccnaaaaaagtgnaaancttnnttttnaaaaacngaanttgnggnannnancnnnggggnanncccctttctgggnaancttttngntgtttnaaaaacnnaannnntnnnttttgnagnaaanncnnnnggggggaantta

SEQ ID NO: 568 - DNA, 1200 bp, Homo Sapiens
  misc_feature (1)..(1): n is a, c, g, or t
  misc_feature (3)..(4): n is a, c, g, or t
  misc_feature (259)..(259): n is a, c, g, or t
  misc_feature (647)..(647): n is a, c, g, or t
  misc_feature (665)..(665): n is a, c, g, or t
  misc_feature (710)..(710): n is a, c, g, or t
  misc_feature (721)..(721): n is a, c, g, or t
  misc_feature (773)..(773): n is a, c, g, or t
  misc_feature (781)..(781): n is a, c, g, or t
  misc_feature (789)..(789): n is a, c, g, or t
  misc_feature (794)..(794): n is a, c, g, or t
  misc_feature (807)..(807): n is a, c, g, or t
  misc_feature (826)..(826): n is a, c, g, or t
  misc_feature (828)..(828): n is a, c, g, or t
  misc_feature (859)..(859): n is a, c, g, or t
  misc_feature (887)..(887): n is a, c, g, or t
  misc_feature (892)..(893): n is a, c, g, or t
  misc_feature (902)..(902): n is a, c, g, or t
  misc_feature (917)..(918): n is a, c, g, or t
  misc_feature (924)..(924): n is a, c, g, or t
  misc_feature (928)..(928): n is a, c, g, or t
  misc_feature (936)..(936): n is a, c, g, or t
  misc_feature (948)..(948): n is a, c, g, or t
  misc_feature (952)..(952): n is a, c, g, or t
  misc_feature (960)..(960): n is a, c, g, or t
  misc_feature (971)..(971): n is a, c, g, or t
  misc_feature (973)..(973): n is a, c, g, or t
  misc_feature (998)..(998): n is a, c, g, or t
  misc_feature (1003)..(1003): n is a, c, g, or t
  misc_feature (1013)..(1013): n is a, c, g, or t
  misc_feature (1015)..(1015): n is a, c, g, or t
  misc_feature (1018)..(1018): n is a, c, g, or t
  misc_feature (1028)..(1028): n is a, c, g, or t
  misc_feature (1035)..(1035): n is a, c, g, or t
  misc_feature (1037)..(1037): n is a, c, g, or t
  misc_feature (1043)..(1043): n is a, c, g, or t
  misc_feature (1045)..(1045): n is a, c, g, or t
  misc_feature (1050)..(1050): n is a, c, g, or t
  misc_feature (1060)..(1060): n is a, c, g, or t
  misc_feature (1070)..(1071): n is a, c, g, or t
  misc_feature (1073)..(1074): n is a, c, g, or t
  misc_feature (1086)..(1086): n is a, c, g, or t
  misc_feature (1093)..(1093): n is a, c, g, or t
  misc_feature (1096)..(1096): n is a, c, g, or t
  misc_feature (1104)..(1104): n is a, c, g, or t
  misc_feature (1112)..(1112): n is a, c, g, or t
  misc_feature (1119)..(1119): n is a, c, g, or t
  misc_feature (1121)..(1121): n is a, c, g, or t
  misc_feature (1129)..(1130): n is a, c, g, or t
  misc_feature (1133)..(1133): n is a, c, g, or t
  misc_feature (1138)..(1138): n is a, c, g, or t
  misc_feature (1143)..(1146): n is a, c, g, or t
  misc_feature (1148)..(1148): n is a, c, g, or t
  misc_feature (1151)..(1151): n is a, c, g, or t
  misc_feature (1156)..(1156): n is a, c, g, or t
  misc_feature (1158)..(1158): n is a, c, g, or t
  misc_feature (1164)..(1164): n is a, c, g, or t
  misc_feature (1167)..(1167): n is a, c, g, or t
  misc_feature (1176)..(1176): n is a, c, g, or t
  misc_feature (1185)..(1185): n is a, c, g, or t
nanntagagagattactatgagaggatcgcatcaccatcaccatcacggatcctatttaggtgacactatagaatcgtcgacccacgcgtccgcggcggcgggcgcagctagcgggtcggccgcggagcggaggtgcagctcggcttcccccggcacccctccccctcgggcgccagccccacccctccgccggccgggccgaccccgccgtactatcccctgcggcgcgagcccggggcggctccaagcgccccccancagacccccatcatgggcagccagagctccaaggctccccggggcgacgtgaccgccgaggaggcagcaggcgcttcccccgcgaaggccaacggccaggagaatggccacgtgaaaagcaatggagacttatcccccaagggtgaaggggagtcgccccctgtgaacggaacagatgaggcagccggggccactggcgatgccatcgagccagcaccccctagccagggtgctgaggccaagggggaggtcccccccaaggagacccccaagaagaagaagaaattctctttcaagaagcctttcaaattgagcggcctgtccttcaagagaaatcggaaggagggtgggggtgattcttctgcctcctcacccacagaggaagagnaggagcagggggagatcngtgcctgcagcgacgagggcactgctcaggaagggaaggccgcanccacccctganagccaggaaccccaggccaagggggcagaggctagtgcagcctcagaagaanaggcaggnccccaggntacanagccatccactcnctcggggccggagagtggncntacaccagccagcgctgaacaaaatgaatanttaggtaaggggcaggttgggtgatctnttaannttcaaaaantgtgttgtcctttgnnaggttnattncttgaacntggtgccctggntgcntttcttgngcccaaaaaangnaaagggcttattgccttcttcccanccaanattccttttntnctntcccttcctngggattncnccaatnanccatnttggttttcnttttaaaggnnannttgaaaaatgtntcttttnaantttttccnaatttatnttaattnantttaaatnnttntttcnttggnnnnanttntttantnttcccnacntttgaaaangaattgttngtttttttcccaatt

SEQ ID NO: 569 - DNA, 1200 bp, Homo Sapiens
  misc_feature (854)..(854): n is a, c, g, or t
  misc_feature (856)..(856): n is a, c, g, or t
  misc_feature (894)..(894): n is a, c, g, or t
  misc_feature (912)..(912): n is a, c, g, or t
  misc_feature (924)..(924): n is a, c, g, or t
  misc_feature (928)..(928): n is a, c, g, or t
  misc_feature (951)..(951): n is a, c, g, or t
  misc_feature (956)..(956): n is a, c, g, or t
  misc_feature (959)..(959): n is a, c, g, or t
  misc_feature (963)..(963): n is a, c, g, or t
  misc_feature (965)..(965): n is a, c, g, or t
  misc_feature (975)..(975): n is a, c, g, or t
  misc_feature (981)..(981): n is a, c, g, or t
  misc_feature (987)..(987): n is a, c, g, or t
  misc_feature (993)..(993): n is a, c, g, or t
  misc_feature (995)..(995): n is a, c, g, or t
  misc_feature (999)..(999): n is a, c, g, or t
  misc_feature (1003)..(1003): n is a, c, g, or t
  misc_feature (1018)..(1018): n is a, c, g, or t
  misc_feature (1028)..(1028): n is a, c, g, or t
  misc_feature (1035)..(1035): n is a, c, g, or t
  misc_feature (1038)..(1038): n is a, c, g, or t
  misc_feature (1067)..(1069): n is a, c, g, or t
  misc_feature (1072)..(1072): n is a, c, g, or t
  misc_feature (1077)..(1077): n is a, c, g, or t
  misc_feature (1114)..(1116): n is a, c, g, or t
  misc_feature (1119)..(1119): n is a, c, g, or t
  misc_feature (1129)..(1129): n is a, c, g, or t
  misc_feature (1135)..(1135): n is a, c, g, or t
  misc_feature (1140)..(1140): n is a, c, g, or t
  misc_feature (1150)..(1150): n is a, c, g, or t
  misc_feature (1155)..(1155): n is a, c, g, or t
  misc_feature (1157)..(1157): n is a, c, g, or t
  misc_feature (1161)..(1162): n is a, c, g, or t
  misc_feature (1169)..(1169): n is a, c, g, or t
  misc_feature (1171)..(1171): n is a, c, g, or t
  misc_feature (1181)..(1181): n is a, c, g, or t
  misc_feature (1183)..(1183): n is a, c, g, or t
  misc_feature (1193)..(1193): n is a, c, g, or t
  misc_feature (1197)..(1199): n is a, c, g, or t
gagaaattactatgagaggatcgcatcaccatcaccatcacggatcctatttaggtgacactatagaatcgtcgacccacgcgtccgcgcaccttctgccagctgatcctggaccccatctccacctacggcgagggcgagagcggccccatgggcaacatcatgatcgatcctgtcctcggtaccgtgggctttgggtctggcctccacgggtgggccttcaccctgaagcagtttgccgagatgtatgtggccaagttcgccgccaagggggagggccagttggggcctgccgagcgggccaagaaagtagaggacaaggacaaagaaggcaaacccctgctgaaggctgtgatgcgccgctggctgcctgccggagacgccttgttgcagatgatcaccatccacctgccctcccctgtgacggcccagaagtaccgctgcgagctcctgtacgaggggcccccggacgacgaggctgccatgggcattaaaagctgtgaccccaaaggccctcttatgatgtatatttccaaaatggtgccaacctccgacaaaggtcggttctacgcctttggacgagtcttctcggggctggtctccactggcctgaaggtcaggatcatggggcccaactatacccctgggaagaaggaggacctctacctgaagccaatccagagaacaatcttgatgatgggccgctacgtggagcccatcgaggatgtgccttgtgggaacattgtgggcctcgtgggcgtggaccagttcctggtgaagacgggcaccatcaccaccttcgagcacgcgcacaacatgcgggtgatgaagttcagcgtcagccctgttgtcanantggccgtggaggccaaaaacccggctgacctgcccaanctggtggaggggctgaancggctggccaantccnacccatggtgcagtgcatcatcnaggantcngganancacatcatcncgggcnccggcnaactgnanctgnaatntgcctgaaggactgnagaagacacncctgctnccnatcaaaaattgaaccggtcgtttcgtacnnnaangtcangaaaaatcaaagtgtttgctttcaagtccccaaaaannnaancggtgtaaanaagggnggccnttcccaaggntggcnanaatnnaaaaagnangttccccccntnaaattaaaangggnnnt

SEQ ID NO: 570 - DNA, 1200 bp, Homo Sapiens
  misc_feature (895)..(895): n is a, c, g, or t
  misc_feature (926)..(926): n is a, c, g, or t
  misc_feature (940)..(940): n is a, c, g, or t
  misc_feature (946)..(946): n is a, c, g, or t
  misc_feature (953)..(955): n is a, c, g, or t
  misc_feature (970)..(970): n is a, c, g, or t
  misc_feature (973)..(973): n is a, c, g, or t
  misc_feature (976)..(976): n is a, c, g, or t
  misc_feature (996)..(997): n is a, c, g, or t
  misc_feature (1015)..(1015): n is a, c, g, or t
  misc_feature (1029)..(1029): n is a, c, g, or t
  misc_feature (1047)..(1047): n is a, c, g, or t
  misc_feature (1049)..(1049): n is a, c, g, or t
  misc_feature (1059)..(1059): n is a, c, g, or t
  misc_feature (1064)..(1064): n is a, c, g, or t
  misc_feature (1078)..(1078): n is a, c, g, or t
  misc_feature (1091)..(1092): n is a, c, g, or t
  misc_feature (1095)..(1095): n is a, c, g, or t
  misc_feature (1102)..(1102): n is a, c, g, or t
  misc_feature (1106)..(1107): n is a, c, g, or t
  misc_feature (1114)..(1114): n is a, c, g, or t
  misc_feature (1131)..(1131): n is a, c, g, or t
  misc_feature (1137)..(1137): n is a, c, g, or t
  misc_feature (1141)..(1141): n is a, c, g, or t
  misc_feature (1144)..(1144): n is a, c, g, or t
  misc_feature (1146)..(1146): n is a, c, g, or t
  misc_feature (1152)..(1152): n is a, c, g, or t
  misc_feature (1156)..(1156): n is a, c, g, or t
  misc_feature (1160)..(1160): n is a, c, g, or t
  misc_feature (1165)..(1165): n is a, c, g, or t
  misc_feature (1169)..(1169): n is a, c, g, or t
  misc_feature (1172)..(1172): n is a, c, g, or t
  misc_feature (1184)..(1184): n is a, c, g, or t
gagaaaattactatgagaggatcgcatcaccatcaccatcacggatcctatttaggtgacactatagaatcgtcgacccacgcgtccgggcggccgaggcggacggaccgcttaaacggctgctcgtgccgattcttttacctgagaaatgttacgaccaacttttcgttcagtgggacttgcttcacgtcccctgcctcaagattctcctcagcaaaggcctggggctgggcattgtggctggctcacttctagtaaagctgccccaggtgtttaaaatcctgggagccaagagtgctgaagggttgagtctccagtctgtaatgctggagctagtggcattgactgggaccatggtctacagcatcactaacaacttcccattcagctcttggggtgaagccttattcctgatgctccagacgatcaccatctgcttcctggtcatgcactacagaggacagactgtgaaaggtgtcgctttcctcgcttgctacggcctggtcctgctggtgcttctctcacctctgacgcccttgactgtagtcaccctgctccaggcctccaatgtgcctgctgtggtggtggggaggcttctccaggcagccaccaactaccacaacgggcacacaggccagctctcagccatcacagtcttcctgctgtttgggggctccctggcccgaatcttcacttccattcaggaaaccggagatcccctgatggctgggacctttgtggtctcctctctctgcaacggcctcatcgccgcccagctgctcttctactggaatgcaaagcctccccacaagcagaaaaaggcgcagtaaagccagctactggagtcattccgtttccactcattcacccaacctcagggttctccccatctganccagcctgctggtgtgacttactcatcctcnattcctctgcactngcaaanttctgannnagggttttcttttantgnaanaaatggttgatggatccagnncttaaaaaaagaaaaganggggggtaaaatcncccaagccaaaaatttgnanatttgaaggntttcnaaaccccggaaatngtacaattaaatnnagncattcanccannccccccncctctaaaaaaaaattnccagcntttnaancnaatccngggnaaangtttnaccnggncctcaacccccnggtttccttttgggcc

SEQ ID NO: 571 - DNA, 1200 bp, Homo Sapiens
  misc_feature (819)..(819): n is a, c, g, or t
  misc_feature (831)..(831): n is a, c, g, or t
  misc_feature (874)..(874): n is a, c, g, or t
  misc_feature (877)..(877): n is a, c, g, or t
  misc_feature (884)..(884): n is a, c, g, or t
  misc_feature (901)..(901): n is a, c, g, or t
  misc_feature (908)..(908): n is a, c, g, or t
  misc_feature (934)..(934): n is a, c, g, or t
  misc_feature (954)..(955): n is a, c, g, or t
  misc_feature (976)..(976): n is a, c, g, or t
  misc_feature (1002)..(1003): n is a, c, g, or t
  misc_feature (1012)..(1012): n is a, c, g, or t
  misc_feature (1022)..(1022): n is a, c, g, or t
  misc_feature (1025)..(1025): n is a, c, g, or t
  misc_feature (1032)..(1032): n is a, c, g, or t
  misc_feature (1046)..(1046): n is a, c, g, or t
  misc_feature (1049)..(1049): n is a, c, g, or t
  misc_feature (1056)..(1057): n is a, c, g, or t
  misc_feature (1061)..(1061): n is a, c, g, or t
  misc_feature (1065)..(1065): n is a, c, g, or t
  misc_feature (1067)..(1067): n is a, c, g, or t
  misc_feature (1073)..(1074): n is a, c, g, or t
  misc_feature (1079)..(1079): n is a, c, g, or t
  misc_feature (1081)..(1081): n is a, c, g, or t
  misc_feature (1083)..(1083): n is a, c, g, or t
  misc_feature (1098)..(1098): n is a, c, g, or t
  misc_feature (1100)..(1100): n is a, c, g, or t
  misc_feature (1102)..(1102): n is a, c, g, or t
  misc_feature (1110)..(1110): n is a, c, g, or t
  misc_feature (1115)..(1115): n is a, c, g, or t
  misc_feature (1118)..(1118): n is a, c, g, or t
  misc_feature (1120)..(1120): n is a, c, g, or t
  misc_feature (1129)..(1130): n is a, c, g, or t
  misc_feature (1137)..(1139): n is a, c, g, or t
  misc_feature (1142)..(1142): n is a, c, g, or t
  misc_feature (1145)..(1145): n is a, c, g, or t
  misc_feature (1148)..(1149): n is a, c, g, or t
  misc_feature (1154)..(1154): n is a, c, g, or t
  misc_feature (1156)..(1156): n is a, c, g, or t
  misc_feature (1162)..(1163): n is a, c, g, or t
  misc_feature (1165)..(1166): n is a, c, g, or t
  misc_feature (1168)..(1168): n is a, c, g, or t
  misc_feature (1170)..(1172): n is a, c, g, or t
  misc_feature (1176)..(1176): n is a, c, g, or t
  misc_feature (1180)..(1181): n is a, c, g, or t
  misc_feature (1195)..(1195): n is a, c, g, or t
  misc_feature (1198)..(1198): n is a, c, g, or t
aatagagagattactatgagaggatcgcatcaccatcaccatcacggatcctatttaggtgacactatagaatcgtcgacccacgcgtccgctcggctccggaatcactgcagcccccctcgccctgagccagagcaccccgggtcccgccagcccctcacactcccagcaaaatgggcaaggagaagacccacatcaacatcgtggtcatcggccacgtggactccggaaagtccaccaccacgggccacctcatctacaaatgcggaggtattgacaaaaggaccattgagaagttcgagaaggaggcggctgagatggggaagggatccttcaagtatgcctgggtgctggacaagctgaaggcggagcgtgagcgcggcatcaccatcgacatctccctctggaagttcgagaccaccaagtactacatcaccatcatcgatgcccccggccaccgcgacttcatcaagaacatgatcacgggtacatcccaggcggactgcgcagtgctgatcgtggcggcgggcgtgggcgagttcgaggcgggcatctccaagaatgggcagacgcgggagcatgccctgctggcctacacgctgggtgtgaagcagctcatcgtgggcgtgaacaaaatggactccacagagccggcctacagcgagaagcgctacgacgagatcgtcaaggaagtcagcgcctacatcaagaagatcggctacaacccggccaccgtgccctttgtgcccatctccggctggcacggcgacaacatgctggagccctccccccaacatgccgtggttcaagggctggaangtggagcgtaangagggcaacgcaaagcggcgtgtccctgctggaggccctgganacnatcctgncccccacgcgcccccanggaaaanccccttgcgccttgccgctgcaagangttgtacaaaattggcgggnnttggcaacggtgcccgtgggnccgggtgggaaaaccgggaattctgnnggccggggnaaggttggtngancctttgncccattgaacttcnccncttgagnntaanttcntngaaatnnccccnananggttttaaagaaatntntncccggggnaaaanttngnttttaattnnaaaaaannntcnttnaannaattncngggggnnanntntnnngggnaaannaattttaacccccnaanaa

SEQ ID NO: 572 - DNA, 1200 bp, Homo Sapiens
  misc_feature (255)..(255): n is a, c, g, or t
  misc_feature (320)..(320): n is a, c, g, or t
  misc_feature (346)..(346): n is a, c, g, or t
  misc_feature (388)..(388): n is a, c, g, or t
  misc_feature (395)..(395): n is a, c, g, or t
  misc_feature (406)..(406): n is a, c, g, or t
  misc_feature (424)..(424): n is a, c, g, or t
  misc_feature (432)..(432): n is a, c, g, or t
  misc_feature (441)..(441): n is a, c, g, or t
  misc_feature (467)..(467): n is a, c, g, or t
  misc_feature (471)..(471): n is a, c, g, or t
  misc_feature (481)..(481): n is a, c, g, or t
  misc_feature (483)..(483): n is a, c, g, or t
  misc_feature (488)..(488): n is a, c, g, or t
  misc_feature (512)..(512): n is a, c, g, or t
  misc_feature (528)..(528): n is a, c, g, or t
  misc_feature (533)..(533): n is a, c, g, or t
  misc_feature (548)..(549): n is a, c, g, or t
  misc_feature (746)..(746): n is a, c, g, or t
  misc_feature (754)..(754): n is a, c, g, or t
  misc_feature (770)..(770): n is a, c, g, or t
  misc_feature (781)..(781): n is a, c, g, or t
  misc_feature (786)..(786): n is a, c, g, or t
  misc_feature (801)..(801): n is a, c, g, or t
  misc_feature (807)..(807): n is a, c, g, or t
  misc_feature (838)..(838): n is a, c, g, or t
  misc_feature (856)..(856): n is a, c, g, or t
  misc_feature (911)..(911): n is a, c, g, or t
  misc_feature (919)..(919): n is a, c, g, or t
  misc_feature (921)..(921): n is a, c, g, or t
  misc_feature (939)..(939): n is a, c, g, or t
  misc_feature (942)..(942): n is a, c, g, or t
  misc_feature (947)..(947): n is a, c, g, or t
  misc_feature (950)..(950): n is a, c, g, or t
  misc_feature (958)..(958): n is a, c, g, or t
  misc_feature (973)..(973): n is a, c, g, or t
  misc_feature (977)..(977): n is a, c, g, or t
  misc_feature (987)..(987): n is a, c, g, or t
  misc_feature (1004)..(1004): n is a, c, g, or t
  misc_feature (1010)..(1010): n is a, c, g, or t
  misc_feature (1028)..(1028): n is a, c, g, or t
  misc_feature (1049)..(1049): n is a, c, g, or t
  misc_feature (1064)..(1064): n is a, c, g, or t
  misc_feature (1084)..(1084): n is a, c, g, or t
  misc_feature (1087)..(1087): n is a, c, g, or t
  misc_feature (1105)..(1105): n is a, c, g, or t
  misc_feature (1111)..(1111): n is a, c, g, or t
  misc_feature (1118)..(1118): n is a, c, g, or t
  misc_feature (1127)..(1128): n is a, c, g, or t
  misc_feature (1138)..(1138): n is a, c, g, or t
  misc_feature (1141)..(1142): n is a, c, g, or t
  misc_feature (1145)..(1145): n is a, c, g, or t
  misc_feature (1150)..(1151): n is a, c, g, or t
  misc_feature (1174)..(1174): n is a, c, g, or t
  misc_feature (1179)..(1179): n is a, c, g, or t
  misc_feature (1191)..(1192): n is a, c, g, or t
aatagagaaattactatgagaggatcgcatcaccatcaccatcacggatcctatttaggtgacactatagaatcgtcgacccacgcgtccggcccaccctgctgctggtgcacagccactccccggcatgagactcagtgcagatggagagacagctacacagagctttggtctgtgtgtgtgtgtgtgcgtgtgtgtgtgtgtgtgcacatccgcgtgtgcctgtgtgcgtgcgcatcttgcctccaggtgcanaggtaccctgggtgtccccgctgctgtgcaacggtctcctgactggtgctgcagcaccgaggggnctttgttctggggggacccagtgcanaatgtaagtgggcccacccggtgggacccccgtggggcaggnagctggncccgacatggntccggcctctgcctttgnaccacggnacatcacanggtgggcctcggcccctcccacaccnaaanctgagcctgnanggaanccccacatgtccagcaccttgtgnctggggtgttagtggnaccgnctccccacctccagnntttcccacttcccaccctgcccctcagagactgaaattacgggtacctgaagatgggagcctttaccttttatgcaaaaggtttattccggaaactagtgtacatttctataaatagatgctgtgtatatggtatatatacatatatatatataacatatatggaagaggaaaaggctggtacaacggaggcctgcnaccctggngacacaagaggcaggnatggccctgtncgggncgtgggggggcgtgnagggangccccagggggtctcacccatgcaagcaaangaccagggctttttctgncaccgcatttttgttttaaactggacctgtatatttgtaaagctattttatgggncccctggnantcttgtttcccacacccnaanacttncancatttaanctggccacatggcgnaaantttaattttnaacttaattgaaaaccnaaaagntttatcccccccaaaaangggacggccaaaaatgtactnccaaccttgccccgnaattgaagaatcccctccanccnaaaaggttgttaaaaatnggaggnaatcccngggaaaaanntttatttccnttnnccnttttnnagaaaaataaaatttcaaaaganttttntttaaaaaaatnnttttttaa

SEQ ID NO: 573 - DNA, 1200 bp, Homo Sapiens
  misc_feature (2)..(2): n is a, c, g, or t
  misc_feature (792)..(792): n is a, c, g, or t
  misc_feature (822)..(822): n is a, c, g, or t
  misc_feature (837)..(837): n is a, c, g, or t
  misc_feature (850)..(850): n is a, c, g, or t
  misc_feature (863)..(863): n is a, c, g, or t
  misc_feature (883)..(883): n is a, c, g, or t
  misc_feature (893)..(893): n is a, c, g, or t
  misc_feature (917)..(917): n is a, c, g, or t
  misc_feature (929)..(929): n is a, c, g, or t
  misc_feature (978)..(979): n is a, c, g, or t
  misc_feature (982)..(982): n is a, c, g, or t
  misc_feature (991)..(991): n is a, c, g, or t
  misc_feature (995)..(995): n is a, c, g, or t
  misc_feature (1000)..(1000): n is a, c, g, or t
  misc_feature (1021)..(1021): n is a, c, g, or t
  misc_feature (1038)..(1038): n is a, c, g, or t
  misc_feature (1046)..(1046): n is a, c, g, or t
  misc_feature (1049)..(1049): n is a, c, g, or t
  misc_feature (1081)..(1081): n is a, c, g, or t
  misc_feature (1086)..(1086): n is a, c, g, or t
  misc_feature (1089)..(1089): n is a, c, g, or t
  misc_feature (1091)..(1091): n is a, c, g, or t
  misc_feature (1095)..(1095): n is a, c, g, or t
  misc_feature (1099)..(1099): n is a, c, g, or t
  misc_feature (1103)..(1103): n is a, c, g, or t
  misc_feature (1107)..(1107): n is a, c, g, or t
  misc_feature (1113)..(1113): n is a, c, g, or t
  misc_feature (1131)..(1132): n is a, c, g, or t
  misc_feature (1140)..(1140): n is a, c, g, or t
  misc_feature (1146)..(1146): n is a, c, g, or t
  misc_feature (1157)..(1157): n is a, c, g, or t
  misc_feature (1168)..(1168): n is a, c, g, or t
  misc_feature (1183)..(1183): n is a, c, g, or t
  misc_feature (1187)..(1187): n is a, c, g, or t
  misc_feature (1190)..(1190): n is a, c, g, or t
  misc_feature (1194)..(1194): n is a, c, g, or t
  misc_feature (1197)..(1197): n is a, c, g, or t
  misc_feature (1199)..(1200): n is a, c, g, or t
anaaatagagaaattactatgagaggatcgcatcaccatcaccatcacggatcctatttaggtgacactatagaatcgtcgacccacgcgtccgggctggtttgcgtcgacatggcggttaccctgagtctcttgctgggcgggcgcgtttgcgccgccgtcactcgctgtgggttcgcgacccggggggtggcgggcccaggccctattggccgggagccggaccccgattccgactgggagccggaggaacgggagctgcaggaggtggagaggtaccggcttctccccgggccctcagcttgaagcagggcctcgtgccccggcgctccaggccgcgcccccttggcgccgggtgtcctgccgctgcttgcgcagcggcccttgtttcttcttacccgttgttaggggcgcagcgtcaggtgttcagctcccctgggaccactggtcccttcattagtgacgtatttcatcatcagtttagagagttcggcatgcttacaggcagttattgttctaggtgttagctttctgggtgtacggagcagctctaagccggcaacatggcccggttgcccttgcgatcaaagagaagagggctgggcgctccatgatttagcctgaggctcttcaaacatccattctgcttccacgcatggcttctgccattggttctcttcccccagcaccctgaaacgacagaaacaagcaatccgattccagaaaattcggaggcaaatggaggcgcctggtgccccgcccaggaccctgacgtgggaagccatggagcanatacggtatttacatgaggaatttccagantcctggtcagttccnaggttggctgaangctttgatgtcancactgatgtgatccgaaaanttttaaaaancaagttttttaacccacattggancaaaagctgaancaggatcaaaaaagtccttaaaaaagctgggcttgcccactcgctgcannaanctccggggntctngaaanacctcaaaactgctcccttgnaggccaatttgtatcangctctttnctnatgccagggcataaacccccattaaaaaaccnaatcnaangnaaantttnaaangganaaatcnaaaactcccaggaaaaannaccccagnaaaagnaaggaaaaaanaaaaaaatccngaacttgaaaaaaantttnggncggnttncnn

SEQ ID NO: 574 - DNA, 1200 bp, Homo Sapiens
  misc_feature (69)..(69): n is a, c, g, or t
  misc_feature (847)..(847): n is a, c, g, or t
  misc_feature (898)..(898): n is a, c, g, or t
  misc_feature (903)..(903): n is a, c, g, or t
  misc_feature (910)..(910): n is a, c, g, or t
  misc_feature (934)..(934): n is a, c, g, or t
  misc_feature (939)..(939): n is a, c, g, or t
  misc_feature (945)..(945): n is a, c, g, or t
  misc_feature (955)..(955): n is a, c, g, or t
  misc_feature (968)..(968): n is a, c, g, or t
  misc_feature (973)..(973): n is a, c, g, or t
  misc_feature (979)..(979): n is a, c, g, or t
  misc_feature (989)..(989): n is a, c, g, or t
  misc_feature (999)..(999): n is a, c, g, or t
  misc_feature (1004)..(1004): n is a, c, g, or t
  misc_feature (1006)..(1006): n is a, c, g, or t
  misc_feature (1019)..(1020): n is a, c, g, or t
  misc_feature (1023)..(1023): n is a, c, g, or t
  misc_feature (1026)..(1026): n is a, c, g, or t
  misc_feature (1028)..(1028): n is a, c, g, or t
  misc_feature (1030)..(1030): n is a, c, g, or t
  misc_feature (1051)..(1051): n is a, c, g, or t
  misc_feature (1059)..(1059): n is a, c, g, or t
  misc_feature (1065)..(1065): n is a, c, g, or t
  misc_feature (1068)..(1069): n is a, c, g, or t
  misc_feature (1071)..(1071): n is a, c, g, or t
  misc_feature (1073)..(1074): n is a, c, g, or t
  misc_feature (1076)..(1076): n is a, c, g, or t
  misc_feature (1084)..(1084): n is a, c, g, or t
  misc_feature (1090)..(1090): n is a, c, g, or t
  misc_feature (1099)..(1099): n is a, c, g, or t
  misc_feature (1101)..(1101): n is a, c, g, or t
  misc_feature (1105)..(1105): n is a, c, g, or t
  misc_feature (1119)..(1119): n is a, c, g, or t
  misc_feature (1128)..(1128): n is a, c, g, or t
  misc_feature (1131)..(1132): n is a, c, g, or t
  misc_feature (1138)..(1138): n is a, c, g, or t
  misc_feature (1143)..(1143): n is a, c, g, or t
  misc_feature (1146)..(1146): n is a, c, g, or t
  misc_feature (1150)..(1150): n is a, c, g, or t
  misc_feature (1152)..(1155): n is a, c, g, or t
  misc_feature (1159)..(1159): n is a, c, g, or t
  misc_feature (1163)..(1164): n is a, c, g, or t
  misc_feature (1167)..(1167): n is a, c, g, or t
  misc_feature (1172)..(1173): n is a, c, g, or t
  misc_feature (1179)..(1179): n is a, c, g, or t
  misc_feature (1188)..(1188): n is a, c, g, or t
  misc_feature (1190)..(1190): n is a, c, g, or t
  misc_feature (1193)..(1193): n is a, c, g, or t
  misc_feature (1196)..(1196): n is a, c, g, or t
  misc_feature (1200)..(1200): n is a, c, g, or t
ttagagaaattactatgagaggatcgcatcaccatcaccatcacggatcctatttaggtgacactatantaatcgtcgacccacgcgtccggcccgagcggagcgccgcacgttcccaaccgcgaggccagacatctgactgttggtgtgagaccagtgctcctggtggtgtgccctgagccatggaggcgcctttgcagacagagatggtggagctggtgcccaatggcaaacactcagaggggctgctcccggtcatcacccccatggcaggcaaccagagggtcgaggaccctgcacggagctgtatggagggcaagagcttcctacagaaaagtcccagcaaggagccacacttcactgacttcgaggggaagacatcattcgggatgtcagtgttcaacctcagcaatgccatcatgggcagcggcatcctgggactcgcctatgccatggccaatacgggcattatccttttcctgttcctgttgacagctgtcgccttgctctccagctactccatccacctgctactcaagtcctcaggggtcgtgggcatccgtgcctatgagcagctgggctaccgtgcctttgggaccccaggaaagctggcagcagccctggccatcacgctccagaacatcggagccatgtccagctacctgtacatcatcaagtctgagctgccacttgtcatacagaccttcctgaacctggaggagaaaacctcggactggtacatgaacgggaactacctggtaatccttgtctctgtcaccatcattctgcccctggcactgatgcggcagcttggctacctgggctactccagcggcttctctcttanctgcatggtgttcttcctaattgcagtcatctacaaaaaagttccacgtgncctgnccactgncccccaacttcaaaaacaccacanggaantttcancccacgtggnaaatcgtgaaagnaaaangtgcanctgcaggtcnagcctgaggnttcancnttttgcatcccanntanttnangntcaattcaaaaaagcataacnatcccatnatggcnttnncntnntntgcacccnaggggngcccatttnantgantcaaggaccccccnaaaaaaaanggnnaaattnccaancgnccancnnnncagnaaannagnaattnngggggnccctttggnanctnacntttn

SEQ ID NO: 575 - DNA, 1371 bp, Homo Sapiens
  misc_feature (1)..(1): n is a, c, g, or t
  misc_feature (928)..(928): n is a, c, g, or t
  misc_feature (948)..(948): n is a, c, g, or t
  misc_feature (956)..(956): n is a, c, g, or t
  misc_feature (992)..(992): n is a, c, g, or t
  misc_feature (1017)..(1017): n is a, c, g, or t
  misc_feature (1021)..(1021): n is a, c, g, or t
  misc_feature (1027)..(1027): n is a, c, g, or t
  misc_feature (1029)..(1029): n is a, c, g, or t
  misc_feature (1031)..(1031): n is a, c, g, or t
  misc_feature (1039)..(1039): n is a, c, g, or t
  misc_feature (1049)..(1049): n is a, c, g, or t
  misc_feature (1052)..(1052): n is a, c, g, or t
  misc_feature (1054)..(1054): n is a, c, g, or t
  misc_feature (1056)..(1056): n is a, c, g, or t
  misc_feature (1062)..(1062): n is a, c, g, or t
  misc_feature (1072)..(1072): n is a, c, g, or t
  misc_feature (1074)..(1074): n is a, c, g, or t
  misc_feature (1082)..(1082): n is a, c, g, or t
  misc_feature (1086)..(1086): n is a, c, g, or t
  misc_feature (1095)..(1095): n is a, c, g, or t
  misc_feature (1110)..(1110): n is a, c, g, or t
  misc_feature (1139)..(1139): n is a, c, g, or t
  misc_feature (1154)..(1154): n is a, c, g, or t
  misc_feature (1173)..(1173): n is a, c, g, or t
  misc_feature (1176)..(1176): n is a, c, g, or t
  misc_feature (1180)..(1180): n is a, c, g, or t
  misc_feature (1185)..(1185): n is a, c, g, or t
  misc_feature (1189)..(1190): n is a, c, g, or t
  misc_feature (1192)..(1192): n is a, c, g, or t
  misc_feature (1200)..(1202): n is a, c, g, or t
  misc_feature (1205)..(1205): n is a, c, g, or t
  misc_feature (1218)..(1219): n is a, c, g, or t
  misc_feature (1225)..(1225): n is a, c, g, or t
  misc_feature (1233)..(1233): n is a, c, g, or t
  misc_feature (1235)..(1235): n is a, c, g, or t
  misc_feature (1245)..(1245): n is a, c, g, or t
  misc_feature (1248)..(1248): n is a, c, g, or t
  misc_feature (1258)..(1258): n is a, c, g, or t
  misc_feature (1270)..(1271): n is a, c, g, or t
  misc_feature (1282)..(1342): n is a, c, g, or t
  misc_feature (1344)..(1346): n is a, c, g, or t
  misc_feature (1351)..(1361): n is a, c, g, or t
  misc_feature (1366)..(1371): n is a, c, g, or t
naattagagaaattactatgagaggatcgcatcaccatcaccatcacggatcctatttaggtgacactatagaatcgtcgacccacgcgtccgcccacgcgtccggccgcgtcgggtgtgcgccgctgctgctgttgcctctgtcttcgcgtcaccacagaggcaagacaagggtccatatcgcggcatccggctcccgcccgtcttcaggagagaaagaaaaaataaaatatacttggggaagttgtacctgccagaattagcaagagctttctttaagaagacatttgtcaaactcaacaaattgaaggttaacaccttaagagttgtagttactgaccagaaatatggacagacttcttagacttggaggaggtatgcctggactgggccaggggccacctacagatgctcctgcagtggacacagcagaacaagtctatatctcttccctggcactgttaaaaatgttaaaacatggccgtgctggagttccaatggaagttatgggtttgatgcttggagaatttgttgatgattataccgtcagagtgattgatgtgtttgctatgccacagtcaggaacaggtgtcagtgtggaggcagttgatccagtgttccaagctaaaatgttggatatgttgaagcagacaggaaggccggagatggttgttggttggtatcacagtcaccctggctttggttgttggctttctggtgtggatatcaacactcagcagagctttgaagccttgtcggagagagctgtggcagtggttgtggatcccattcagagtgtaaaaggaaaggttgttattgatgccttcagattgatcaatgctaatatgatggtcttaggacatgaaccaagacaaacaacttcgaatctgggtcacttaaacaagccatctatccaggcattaattcntggactaaacagacattatnactccatnactattaactatcggaaaaatgaactggaacaaaanatgttgctaaatttgcaaaaaaaanttgnatggangntngaccttcnggactacggnganantngtaacncaatgaatcngnggtaaaanaaangttggaatnaccaaaaattacaanaggctgtaaaaaaaaaaaaaaaagacccnggaacccttggcaanaaaaagttggcaacagganccnaacnttttnggannanagggggannnctnaaaccccaaattnncccggnttaaaccnanttggaaacgnccnttttaaaaanccccaaaacccnnaaaaaaaaaannnnnnnnnnnnnnnnnnnnnnnnnnnnnnnnnnnnnnnnnnnnnnnnnnnnnnnnnnnnngnnnccccnnnnnnnnnnnttttnnnnnn

SEQ ID NO: 576 - DNA, 1443 bp, Homo Sapiens
  misc_feature (969)..(970): n is a, c, g, or t
  misc_feature (990)..(990): n is a, c, g, or t
  misc_feature (1000)..(1000): n is a, c, g, or t
  misc_feature (1006)..(1006): n is a, c, g, or t
  misc_feature (1042)..(1042): n is a, c, g, or t
  misc_feature (1045)..(1045): n is a, c, g, or t
  misc_feature (1054)..(1054): n is a, c, g, or t
  misc_feature (1069)..(1069): n is a, c, g, or t
  misc_feature (1071)..(1071): n is a, c, g, or t
  misc_feature (1088)..(1088): n is a, c, g, or t
  misc_feature (1093)..(1093): n is a, c, g, or t
  misc_feature (1101)..(1101): n is a, c, g, or t
  misc_feature (1104)..(1104): n is a, c, g, or t
  misc_feature (1122)..(1122): n is a, c, g, or t
  misc_feature (1125)..(1126): n is a, c, g, or t
  misc_feature (1137)..(1137): n is a, c, g, or t
  misc_feature (1146)..(1146): n is a, c, g, or t
  misc_feature (1153)..(1154): n is a, c, g, or t
  misc_feature (1158)..(1158): n is a, c, g, or t
  misc_feature (1166)..(1166): n is a, c, g, or t
  misc_feature (1187)..(1188): n is a, c, g, or t
  misc_feature (1196)..(1198): n is a, c, g, or t
  misc_feature (1201)..(1202): n is a, c, g, or t
  misc_feature (1206)..(1206): n is a, c, g, or t
  misc_feature (1209)..(1209): n is a, c, g, or t
  misc_feature (1211)..(1211): n is a, c, g, or t
  misc_feature (1222)..(1222): n is a, c, g, or t
  misc_feature (1229)..(1229): n is a, c, g, or t
  misc_feature (1236)..(1237): n is a, c, g, or t
  misc_feature (1247)..(1247): n is a, c, g, or t
  misc_feature (1249)..(1249): n is a, c, g, or t
  misc_feature (1261)..(1261): n is a, c, g, or t
  misc_feature (1263)..(1263): n is a, c, g, or t
  misc_feature (1266)..(1266): n is a, c, g, or t
  misc_feature (1278)..(1279): n is a, c, g, or t
  misc_feature (1281)..(1281): n is a, c, g, or t
  misc_feature (1284)..(1284): n is a, c, g, or t
  misc_feature (1298)..(1299): n is a, c, g, or t
  misc_feature (1301)..(1302): n is a, c, g, or t
  misc_feature (1320)..(1320): n is a, c, g, or t
  misc_feature (1324)..(1324): n is a, c, g, or t
  misc_feature (1328)..(1328): n is a, c, g, or t
  misc_feature (1330)..(1330): n is a, c, g, or t
  misc_feature (1332)..(1332): n is a, c, g, or t
  misc_feature (1334)..(1334): n is a, c, g, or t
  misc_feature (1346)..(1346): n is a, c, g, or t
  misc_feature (1351)..(1351): n is a, c, g, or t
  misc_feature (1358)..(1358): n is a, c, g, or t
  misc_feature (1372)..(1372): n is a, c, g, or t
  misc_feature (1379)..(1379): n is a, c, g, or t
  misc_feature (1385)..(1385): n is a, c, g, or t
  misc_feature (1393)..(1393): n is a, c, g, or t
  misc_feature (1397)..(1397): n is a, c, g, or t
  misc_feature (1399)..(1399): n is a, c, g, or t
  misc_feature (1402)..(1402): n is a, c, g, or t
  misc_feature (1427)..(1428): n is a, c, g, or t
  misc_feature (1431)..(1432): n is a, c, g, or t
  misc_feature (1434)..(1434): n is a, c, g, or t
  misc_feature (1441)..(1441): n is a, c, g, or t
tagagaaattactatgagaggatcgcatcaccatcaccatcacggatcctatttaggtgacactatagaatcgtcgacccacgcgtccgtccagattgtcctttttgacccaaaaggtggtgccagaattgataaagtgtatgggactgccaacatcactcttgtctcagatgcagattcgcaggccatttgggggcttgcagatcagctacatcagcctgtgaatgatgatattctcaacagagtgctccataccatcagcatgaaagtggccacagaaaacacagatgaacaactcagtgccatgatgcatttaatagaaaagataactactgaaggaaaaattcaagctttcagtgttgccagccgaactcttttctatgagattctttgttctcttattaacccaaagcgcaaggacactaggggattcagtcactttgctgaagtgactgagaattttgccttttctctgctgactaatgttacttgcggctctcctggtgaaaaaagcaaaaccatccttgatagttgcccatatttgtcaatattggctcttcactggtatcctcagcaaatcaatggacacaagtttgaaggaaaggaaggagattacattcgaattccagagaggctactggatgtccaggatgcagaaataatggctgggaaaagtacatgtaaattagtccagtttacagagtatagcagccaacagtggtttataagtggaaacaatcttcctaccctaaaaaataaggtattatctttgagtgtgaaaggtcagagttcacaactcctgactaatgacaatgagggttctctacaggatttatgctgctgagcctagaattattcctcagacatctctgtgtctcctttggaaatcaggctgcctgcaagctggttgtctgacagttcagttttgcaaagggaatggaggaaaacttgcagactatgtgggaaagnngcctggttccccctgtctgngtatgctgtntatgcnccggacggacaacttggtcttccaacaaagaagccntcnttcccttcngggatttaaaggaancncaaggccttgcttggcnggttntttccccnaancttctgggcccgggaacnccnngtttggcagcnaaactttcngaccccnngganggcccccnccttaggtacccaaaattctnnttctgggnnncgnnaaancanancccaacttccntaaaaanagtttcnncaaggggggngnccaaataccggntnttngcagttaacggnngnccnttcacccggaattnngnnaggcgggggaaaagggancccncaangncnancccgggttttcnttganggggacncccctttgggggtncccccanttttgngagaaccncaangntcncattgggcttcggggcggttttccnnccnncncttttcncc

SEQ ID NO: 577 - DNA, 1493 bp, Homo Sapiens
  misc_feature (3)..(4): n is a, c, g, or t
  misc_feature (73)..(73): n is a, c, g, or t
  misc_feature (96)..(97): n is a, c, g, or t
  misc_feature (102)..(102): n is a, c, g, or t
  misc_feature (127)..(127): n is a, c, g, or t
  misc_feature (131)..(131): n is a, c, g, or t
  misc_feature (136)..(136): n is a, c, g, or t
  misc_feature (141)..(141): n is a, c, g, or t
  misc_feature (149)..(149): n is a, c, g, or t
  misc_feature (163)..(163): n is a, c, g, or t
  misc_feature (200)..(200): n is a, c, g, or t
  misc_feature (243)..(243): n is a, c, g, or t
  misc_feature (308)..(308): n is a, c, g, or t
  misc_feature (332)..(332): n is a, c, g, or t
  misc_feature (350)..(350): n is a, c, g, or t
  misc_feature (380)..(380): n is a, c, g, or t
  misc_feature (383)..(383): n is a, c, g, or t
  misc_feature (393)..(393): n is a, c, g, or t
  misc_feature (396)..(396): n is a, c, g, or t
  misc_feature (402)..(402): n is a, c, g, or t
  misc_feature (404)..(404): n is a, c, g, or t
  misc_feature (430)..(430): n is a, c, g, or t
  misc_feature (435)..(435): n is a, c, g, or t
  misc_feature (449)..(449): n is a, c, g, or t
  misc_feature (475)..(475): n is a, c, g, or t
  misc_feature (485)..(485): n is a, c, g, or t
  misc_feature (508)..(508): n is a, c, g, or t
  misc_feature (510)..(510): n is a, c, g, or t
  misc_feature (512)..(512): n is a, c, g, or t
  misc_feature (525)..(525): n is a, c, g, or t
  misc_feature (532)..(532): n is a, c, g, or t
  misc_feature (545)..(545): n is a, c, g, or t
  misc_feature (557)..(557): n is a, c, g, or t
  misc_feature (565)..(566): n is a, c, g, or t
  misc_feature (588)..(588): n is a, c, g, or t
  misc_feature (592)..(592): n is a, c, g, or t
  misc_feature (597)..(597): n is a, c, g, or t
  misc_feature (600)..(601): n is a, c, g, or t
  misc_feature (609)..(609): n is a, c, g, or t
  misc_feature (626)..(626): n is a, c, g, or t
  misc_feature (640)..(640): n is a, c, g, or t
  misc_feature (665)..(665): n is a, c, g, or t
  misc_feature (669)..(669): n is a, c, g, or t
  misc_feature (673)..(673): n is a, c, g, or t
  misc_feature (689)..(689): n is a, c, g, or t
  misc_feature (691)..(691): n is a, c, g, or t
  misc_feature (693)..(693): n is a, c, g, or t
  misc_feature (695)..(695): n is a, c, g, or t
  misc_feature (723)..(723): n is a, c, g, or t
  misc_feature (731)..(731): n is a, c, g, or t
  misc_feature (742)..(742): n is a, c, g, or t
  misc_feature (750)..(750): n is a, c, g, or t
  misc_feature (755)..(755): n is a, c, g, or t
  misc_feature (772)..(772): n is a, c, g, or t
  misc_feature (778)..(778): n is a, c, g, or t
  misc_feature (799)..(799): n is a, c, g, or t
  misc_feature (817)..(817): n is a, c, g, or t
  misc_feature (820)..(820): n is a, c, g, or t
  misc_feature (823)..(823): n is a, c, g, or t
  misc_feature (840)..(841): n is a, c, g, or t
  misc_feature (849)..(849): n is a, c, g, or t
  misc_feature (852)..(852): n is a, c, g, or t
  misc_feature (856)..(856): n is a, c, g, or t
  misc_feature (865)..(865): n is a, c, g, or t
  misc_feature (872)..(874): n is a, c, g, or t
  misc_feature (887)..(888): n is a, c, g, or t
  misc_feature (919)..(919): n is a, c, g, or t
  misc_feature (924)..(925): n is a, c, g, or t
  misc_feature (930)..(930): n is a, c, g, or t
  misc_feature (932)..(932): n is a, c, g, or t
  misc_feature (936)..(937): n is a, c, g, or t
  misc_feature (946)..(946): n is a, c, g, or t
  misc_feature (951)..(951): n is a, c, g, or t
  misc_feature (961)..(961): n is a, c, g, or t
  misc_feature (968)..(968): n is a, c, g, or t
  misc_feature (975)..(975): n is a, c, g, or t
  misc_feature (978)..(978): n is a, c, g, or t
  misc_feature (980)..(980): n is a, c, g, or t
  misc_feature (986)..(986): n is a, c, g, or t
  misc_feature (988)..(988): n is a, c, g, or t
  misc_feature (991)..(991): n is a, c, g, or t
  misc_feature (994)..(994): n is a, c, g, or t
  misc_feature (1001)..(1002): n is a, c, g, or t
  misc_feature (1009)..(1012): n is a, c, g, or t
  misc_feature (1015)..(1015): n is a, c, g, or t
  misc_feature (1021)..(1021): n is a, c, g, or t
  misc_feature (1033)..(1033): n is a, c, g, or t
  misc_feature (1040)..(1040): n is a, c, g, or t
  misc_feature (1042)..(1042): n is a, c, g, or t
  misc_feature (1044)..(1044): n is a, c, g, or t
  misc_feature (1050)..(1050): n is a, c, g, or t
  misc_feature (1056)..(1056): n is a, c, g, or t
  misc_feature (1059)..(1059): n is a, c, g, or t
  misc_feature (1061)..(1061): n is a, c, g, or t
  misc_feature (1063)..(1063): n is a, c, g, or t
  misc_feature (1069)..(1069): n is a, c, g, or t
  misc_feature (1071)..(1071): n is a, c, g, or t
  misc_feature (1076)..(1076): n is a, c, g, or t
  misc_feature (1083)..(1083): n is a, c, g, or t
  misc_feature (1096)..(1096): n is a, c, g, or t
  misc_feature (1099)..(1099): n is a, c, g, or t
  misc_feature (1102)..(1103): n is a, c, g, or t
  misc_feature (1109)..(1110): n is a, c, g, or t
  misc_feature (1115)..(1115): n is a, c, g, or t
  misc_feature (1120)..(1120): n is a, c, g, or t
  misc_feature (1123)..(1124): n is a, c, g, or t
  misc_feature (1131)..(1131): n is a, c, g, or t
  misc_feature (1139)..(1139): n is a, c, g, or t
  misc_feature (1142)..(1143): n is a, c, g, or t
  misc_feature (1150)..(1150): n is a, c, g, or t
  misc_feature (1153)..(1153): n is a, c, g, or t
  misc_feature (1166)..(1166): n is a, c, g, or t
  misc_feature (1178)..(1178): n is a, c, g, or t
  misc_feature (1182)..(1182): n is a, c, g, or t
  misc_feature (1184)..(1184): n is a, c, g, or t
  misc_feature (1190)..(1190): n is a, c, g, or t
  misc_feature (1192)..(1192): n is a, c, g, or t
  misc_feature (1199)..(1199): n is a, c, g, or t
  misc_feature (1201)..(1201): n is a, c, g, or t
  misc_feature (1206)..(1206): n is a, c, g, or t
  misc_feature (1208)..(1208): n is a, c, g, or t
  misc_feature (1212)..(1212): n is a, c, g, or t
  misc_feature (1218)..(1218): n is a, c, g, or t
  misc_feature (1220)..(1220): n is a, c, g, or t
  misc_feature (1222)..(1222): n is a, c, g, or t
  misc_feature (1228)..(1228): n is a, c, g, or t
  misc_feature (1232)..(1232): n is a, c, g, or t
  misc_feature (1241)..(1241): n is a, c, g, or t
  misc_feature (1243)..(1244): n is a, c, g, or t
  misc_feature (1247)..(1247): n is a, c, g, or t
  misc_feature (1255)..(1256): n is a, c, g, or t
  misc_feature (1260)..(1260): n is a, c, g, or t
  misc_feature (1274)..(1274): n is a, c, g, or t
  misc_feature (1277)..(1277): n is a, c, g, or t
  misc_feature (1280)..(1280): n is a, c, g, or t
  misc_feature (1290)..(1290): n is a, c, g, or t
  misc_feature (1293)..(1293): n is a, c, g, or t
  misc_feature (1305)..(1305): n is a, c, g, or t
  misc_feature (1309)..(1311): n is a, c, g, or t
  misc_feature (1314)..(1315): n is a, c, g, or t
  misc_feature (1337)..(1338): n is a, c, g, or t
  misc_feature (1340)..(1341): n is a, c, g, or t
  misc_feature (1350)..(1351): n is a, c, g, or t
  misc_feature (1354)..(1354): n is a, c, g, or t
  misc_feature (1359)..(1360): n is a, c, g, or t
  misc_feature (1363)..(1364): n is a, c, g, or t
  misc_feature (1370)..(1370): n is a, c, g, or t
  misc_feature (1382)..(1382): n is a, c, g, or t
  misc_feature (1389)..(1390): n is a, c, g, or t
  misc_feature (1394)..(1394): n is a, c, g, or t
  misc_feature (1397)..(1397): n is a, c, g, or t
  misc_feature (1402)..(1402): n is a, c, g, or t
  misc_feature (1405)..(1406): n is a, c, g, or t
  misc_feature (1409)..(1409): n is a, c, g, or t
  misc_feature (1413)..(1413): n is a, c, g, or t
  misc_feature (1416)..(1416): n is a, c, g, or t
  misc_feature (1420)..(1420): n is a, c, g, or t
  misc_feature (1423)..(1423): n is a, c, g, or t
  misc_feature (1428)..(1429): n is a, c, g, or t
  misc_feature (1431)..(1432): n is a, c, g, or t
  misc_feature (1434)..(1436): n is a, c, g, or t
  misc_feature (1438)..(1438): n is a, c, g, or t
  misc_feature (1447)..(1447): n is a, c, g, or t
  misc_feature (1450)..(1450): n is a, c, g, or t
  misc_feature (1454)..(1455): n is a, c, g, or t
  misc_feature (1458)..(1458): n is a, c, g, or t
  misc_feature (1461)..(1461): n is a, c, g, or t
  misc_feature (1469)..(1469): n is a, c, g, or t
  misc_feature (1471)..(1472): n is a, c, g, or t
  misc_feature (1474)..(1474): n is a, c, g, or t
  misc_feature (1476)..(1476): n is a, c, g, or t
  misc_feature (1481)..(1481): n is a, c, g, or t
  misc_feature (1487)..(1487): n is a, c, g, or t
ttnntagagaaattactatgagaggatcgcatcaccatcaccatcacgggatcctatttaggtgacactatanaatcgtcgacccacgcgtccggnnccagnaggagctcccgagggcgtgacgcgngcancacanactcngctgcacnggcttcgcgggcgncacgtgtgggccgcgctttgtgctgtgtcattgcacnggcccgggtgggggtggcagggcgggactggggctcctcccangctcgggtgcgggcgcggagggcgcgcgcctcctggccccgccccctggcaggtgcccgcgaccngcgtgtccccgtgcgcctggccgncttgtctcctctccgcangtgctgtcccggctggggatcgccggccantgncgcttcgtgnacntgctgngnctggaagaggagtctctgggctcggngccancgcctgcctgcgcnctgctgctgctgtttcccctcacggnccatcatganaacttcaggaaaaagcagattgnananctgaaaggacaanaagttantcctaaagtgtanttcatgaaacanaccattgnnaattcctgtggcacaatcgganttantcacncanngagccaanaatcaagacaaactggnatttgaggatggancagttctgaaaaatttcttttctgnaaanaganaaaatgtcccctgaanananantaaaaatgctttgaaaaaaaatgagggncatacagncagcccatgangccgtggnacaangaaagacaatgtcgggncagatnaacaaaagtgaaattttccanttttaatcctgtttaacnaanttngaatgaaccactttctnnaaactttnatntaangaaatgtcnttttccnnnttaacaatgggtnnccaaattaaaaaaaaacccttgctaaaagancgctnnccaangntctnncacaaaaanttccncctatcttgnaacaaanaaaaaanttncnctcctntnccnttnaattttnnaccaaannnnacntatatntttttgtggganaaaactntncngatttncccctnctncncntcaaananaaaanaaataanacccccccctatnagntcnnaaaaanntttantaaanttnngaaaacnaatttttnttnnaggttanaanaaaaatcccttcncccaaaacaaanaatntntatatnancaaaatnanagagncnaatnttacantntngccacntatngatttgatntnnaantttaaaanncatnccaacagaaaatanttntanaatatttatnacnttaatgtctaantttnnnttnntgttcacacaataaactatatnnannaatataaanntcncactnnatnncaaaanactcttctccanatacaannaacncanaattnatnnctnaccnccncttnctnactcnncnnannnanacactcatnagncttnnctnttntctaaatnanncntnccctnatatanaaaaaa

SEQ ID NO: 578 - DNA, 1360 bp, Homo Sapiens
  misc_feature (816)..(816): n is a, c, g, or t
  misc_feature (921)..(921): n is a, c, g, or t
  misc_feature (926)..(926): n is a, c, g, or t
  misc_feature (931)..(931): n is a, c, g, or t
  misc_feature (934)..(934): n is a, c, g, or t
  misc_feature (946)..(946): n is a, c, g, or t
  misc_feature (959)..(959): n is a, c, g, or t
  misc_feature (991)..(991): n is a, c, g, or t
  misc_feature (1047)..(1047): n is a, c, g, or t
  misc_feature (1051)..(1051): n is a, c, g, or t
  misc_feature (1068)..(1068): n is a, c, g, or t
  misc_feature (1079)..(1079): n is a, c, g, or t
  misc_feature (1081)..(1081): n is a, c, g, or t
  misc_feature (1087)..(1087): n is a, c, g, or t
  misc_feature (1089)..(1089): n is a, c, g, or t
  misc_feature (1095)..(1096): n is a, c, g, or t
  misc_feature (1102)..(1102): n is a, c, g, or t
  misc_feature (1105)..(1105): n is a, c, g, or t
  misc_feature (1107)..(1107): n is a, c, g, or t
  misc_feature (1118)..(1119): n is a, c, g, or t
  misc_feature (1125)..(1125): n is a, c, g, or t
  misc_feature (1129)..(1129): n is a, c, g, or t
  misc_feature (1141)..(1141): n is a, c, g, or t
  misc_feature (1164)..(1164): n is a, c, g, or t
  misc_feature (1168)..(1168): n is a, c, g, or t
  misc_feature (1182)..(1182): n is a, c, g, or t
  misc_feature (1184)..(1184): n is a, c, g, or t
  misc_feature (1194)..(1195): n is a, c, g, or t
  misc_feature (1200)..(1201): n is a, c, g, or t
  misc_feature (1205)..(1205): n is a, c, g, or t
  misc_feature (1215)..(1216): n is a, c, g, or t
  misc_feature (1228)..(1228): n is a, c, g, or t
  misc_feature (1246)..(1246): n is a, c, g, or t
  misc_feature (1256)..(1257): n is a, c, g, or t
  misc_feature (1276)..(1276): n is a, c, g, or t
  misc_feature (1278)..(1280): n is a, c, g, or t
  misc_feature (1292)..(1292): n is a, c, g, or t
  misc_feature (1295)..(1295): n is a, c, g, or t
  misc_feature (1297)..(1297): n is a, c, g, or t
  misc_feature (1312)..(1312): n is a, c, g, or t
  misc_feature (1318)..(1318): n is a, c, g, or t
  misc_feature (1324)..(1324): n is a, c, g, or t
  misc_feature (1326)..(1326): n is a, c, g, or t
  misc_feature (1332)..(1333): n is a, c, g, or t
  misc_feature (1337)..(1337): n is a, c, g, or t
  misc_feature (1340)..(1340): n is a, c, g, or t
  misc_feature (1344)..(1346): n is a, c, g, or t
  misc_feature (1353)..(1353): n is a, c, g, or t
  misc_feature (1360)..(1360): n is a, c, g, or t
tagagaaattactatgagaggatcgcatcaccatcaccatcacggatcctatttaggtgacactatagaatcgtcgacccacgcgtccggggacagcgaaatggaggggtgtgtgtctaacctaatggtctgcaacctggcctacagcgggaagctggaagagttgaaggagagtattctggccgataaatccctggctactagaactgaccaggacagcagaactgcattgcactgggcatgctcagctggacatacagaaattgttgaatttttgttgcaacttggagtgccagtgaatgataaagacgatgcaggttggtctcctcttcatattgcggcttctgctggccgggatgagattgtaaaagcccttctgggaaaaggtgctcaagtgaatgctgtcaatcaaaatggctgtactcccttacattatgcagcttcgaaaaacaggcatgagatcgctgtcatgttactggaaggcggggctaatccagatgctaaggaccattatgaggctacagcaatgcaccgggcagcagccaaggacacttagcctgtgatgaggagagagtggaagaagcaaaactgctggtgtcccaaggagcaagtatttacattgagaataaagaagaaaagacacccctgcaagtggccaaaggtggcctgggtttaatactcaagagaatggtggaaggttaaacagcttggatttattcttactttgtatgttgtgttgttgtccccagtgtcctacaaactaatgtatttgtgcacaagacatcatctatgaatgatgaagttttctcaccttcnaagtcttataaacatgttgactcttgttcctgctgagttacttgttcgaagcttacagcttgttttccaggcatcgaataactgttgagattgttctactgttgncgaanattcntcnatattgaattcnggttaatttggantaactaattctgtggctgtggtgagtcttcancaccctcccatgtaccttaaatccccccctgaaacaaaaagctccaaaacaacaanctanttgttctgccaaagttncatggggatcngnaaggtncnccaacnnttaaancancnaacttgttttnnagctcnctcngcctaccccaangttttgtttttttaacccggagnttanttttttttggaaangnggaatttccnnttttnngggnccccttttanntgggaggggggncccaaaacggaaaaaaanccccaaaccnngtttttttttaggggtttncnnnaaaaaaaggggnttntnaaaaaattaaaaccnatttgncccccntnaaaaanncccnttnaaannntaaaaanttttttn

SEQ ID NO: 579 - DNA, 1375 bp, Homo Sapiens
  misc_feature (1)..(2): n is a, c, g, or t
  misc_feature (4)..(4): n is a, c, g, or t
  misc_feature (889)..(889): n is a, c, g, or t
  misc_feature (896)..(896): n is a, c, g, or t
  misc_feature (898)..(898): n is a, c, g, or t
  misc_feature (903)..(903): n is a, c, g, or t
  misc_feature (908)..(908): n is a, c, g, or t
  misc_feature (920)..(920): n is a, c, g, or t
  misc_feature (947)..(947): n is a, c, g, or t
  misc_feature (956)..(956): n is a, c, g, or t
  misc_feature (962)..(962): n is a, c, g, or t
  misc_feature (970)..(970): n is a, c, g, or t
  misc_feature (975)..(975): n is a, c, g, or t
  misc_feature (977)..(977): n is a, c, g, or t
  misc_feature (984)..(984): n is a, c, g, or t
  misc_feature (988)..(988): n is a, c, g, or t
  misc_feature (1004)..(1004): n is a, c, g, or t
  misc_feature (1009)..(1009): n is a, c, g, or t
  misc_feature (1024)..(1024): n is a, c, g, or t
  misc_feature (1026)..(1026): n is a, c, g, or t
  misc_feature (1029)..(1029): n is a, c, g, or t
  misc_feature (1034)..(1034): n is a, c, g, or t
  misc_feature (1038)..(1038): n is a, c, g, or t
  misc_feature (1061)..(1061): n is a, c, g, or t
  misc_feature (1066)..(1066): n is a, c, g, or t
  misc_feature (1072)..(1072): n is a, c, g, or t
  misc_feature (1075)..(1075): n is a, c, g, or t
  misc_feature (1079)..(1079): n is a, c, g, or t
  misc_feature (1103)..(1103): n is a, c, g, or t
  misc_feature (1106)..(1106): n is a, c, g, or t
  misc_feature (1112)..(1112): n is a, c, g, or t
  misc_feature (1123)..(1123): n is a, c, g, or t
  misc_feature (1127)..(1127): n is a, c, g, or t
  misc_feature (1129)..(1129): n is a, c, g, or t
  misc_feature (1134)..(1134): n is a, c, g, or t
  misc_feature (1140)..(1140): n is a, c, g, or t
  misc_feature (1142)..(1142): n is a, c, g, or t
  misc_feature (1150)..(1150): n is a, c, g, or t
  misc_feature (1152)..(1153): n is a, c, g, or t
  misc_feature (1158)..(1158): n is a, c, g, or t
  misc_feature (1165)..(1165): n is a, c, g, or t
  misc_feature (1171)..(1171): n is a, c, g, or t
  misc_feature (1177)..(1177): n is a, c, g, or t
  misc_feature (1194)..(1194): n is a, c, g, or t
  misc_feature (1198)..(1199): n is a, c, g, or t
  misc_feature (1205)..(1207): n is a, c, g, or t
  misc_feature (1210)..(1210): n is a, c, g, or t
  misc_feature (1218)..(1218): n is a, c, g, or t
  misc_feature (1220)..(1221): n is a, c, g, or t
  misc_feature (1225)..(1225): n is a, c, g, or t
  misc_feature (1239)..(1240): n is a, c, g, or t
  misc_feature (1244)..(1245): n is a, c, g, or t
  misc_feature (1247)..(1249): n is a, c, g, or t
  misc_feature (1251)..(1251): n is a, c, g, or t
  misc_feature (1255)..(1255): n is a, c, g, or t
  misc_feature (1262)..(1262): n is a, c, g, or t
  misc_feature (1265)..(1265): n is a, c, g, or t
  misc_feature (1267)..(1267): n is a, c, g, or t
  misc_feature (1271)..(1271): n is a, c, g, or t
  misc_feature (1273)..(1278): n is a, c, g, or t
  misc_feature (1282)..(1284): n is a, c, g, or t
  misc_feature (1291)..(1293): n is a, c, g, or t
  misc_feature (1295)..(1295): n is a, c, g, or t
  misc_feature (1303)..(1305): n is a, c, g, or t
  misc_feature (1309)..(1309): n is a, c, g, or t
  misc_feature (1351)..(1352): n is a, c, g, or t
  misc_feature (1354)..(1355): n is a, c, g, or t
  misc_feature (1358)..(1360): n is a, c, g, or t
  misc_feature (1362)..(1371): n is a, c, g, or t
  misc_feature (1373)..(1373): n is a, c, g, or t
nnantagagaaaattactatgagaggatcgcatcaccatcaccatcacggatcctatttaggtgacactatagaatcgtcgacccacgcgtccgcccacgcgtccgagcggaaccgcagtgaccggttctacagcacccggtgctgcggctgttgccatgtccgcaccgggacgatcatcctggggacctggtacatggtagtaaacctattgatggcaattttgctgactgtggaagtgactcatccaaactccatgccagctgtcaacattcagtatgaagtcatcggtaattactattcgtctgagagaatggctgataatgcctgtgttctttttgccgtctctgttcttatgtttataatcagttcaatgctggtttatggagcaatttcttatcaagtgggttggctgattccattcttctgttaccgactttttgacttcgtcctcagttgcctggttgctattagttctctcacctatttgccaagaatcaaagaatatctggatcaactacctgattttccctacaaagatgacctcctggccttggactccagctgcctcctgttcattgttcttgtgttctttgccttattcatcatttttaaggcttatctaattaactgtgtttggaactgctataaatacatcaacaaccgaaacgtgccggagattgctgtgtaccctgcctttgaagcacctcctcagtacgttttgccaacctatgaaatggccgtgaaaatgcctgaaaaagaaccaccacctccttacttacctgcctgaagaaattctgcctttgacaataaatcctataccagctttttgtttgtttatgttacagaatgctgcaattcagggctcttcaaacttgtttgaaaaaaanatgttgncntttgnttaancatttattttcnaacactaaggagctttttgacatctgntaaacgtcnttttgnttttttgntaagncntttacantttnaaaagtttttgaaaanaatcnaggttaaaccaagancnaantgccnttgnttgcctttaattggggggggggnaaggnaaaaanggnactngcccaaaaatttccctttttaacngcnctttcnttaaaaaaccnttgncntttgntactgncnacccggananntttcnggaaaanggaatnaaaatncggggggaaaaaaaatngggnnaaaaannnaantttttccngnnaggnaaaaaaaaatttannttgnncnnncngggnaaaaaanggngnggtncnnnnnnaaannntcccccnnngnaaaaaaannnaaancccttaaaaaaaaaaaaaaaaaaaaaaaaaaggggccccccnnannggnnnannnnnnnnnngngg

SEQ ID NO: 580 - DNA, 1352 bp, Homo Sapiens
  misc_feature (828)..(828): n is a, c, g, or t
  misc_feature (869)..(869): n is a, c, g, or t
  misc_feature (873)..(873): n is a, c, g, or t
  misc_feature (929)..(929): n is a, c, g, or t
  misc_feature (939)..(939): n is a, c, g, or t
  misc_feature (952)..(952): n is a, c, g, or t
  misc_feature (980)..(980): n is a, c, g, or t
  misc_feature (987)..(987): n is a, c, g, or t
  misc_feature (990)..(990): n is a, c, g, or t
  misc_feature (997)..(997): n is a, c, g, or t
  misc_feature (999)..(999): n is a, c, g, or t
  misc_feature (1009)..(1009): n is a, c, g, or t
  misc_feature (1011)..(1011): n is a, c, g, or t
  misc_feature (1049)..(1049): n is a, c, g, or t
  misc_feature (1065)..(1065): n is a, c, g, or t
  misc_feature (1069)..(1069): n is a, c, g, or t
  misc_feature (1071)..(1071): n is a, c, g, or t
  misc_feature (1074)..(1074): n is a, c, g, or t
  misc_feature (1079)..(1080): n is a, c, g, or t
  misc_feature (1084)..(1085): n is a, c, g, or t
  misc_feature (1087)..(1088): n is a, c, g, or t
  misc_feature (1091)..(1092): n is a, c, g, or t
  misc_feature (1098)..(1098): n is a, c, g, or t
  misc_feature (1101)..(1101): n is a, c, g, or t
  misc_feature (1108)..(1108): n is a, c, g, or t
  misc_feature (1113)..(1114): n is a, c, g, or t
  misc_feature (1119)..(1119): n is a, c, g, or t
  misc_feature (1142)..(1144): n is a, c, g, or t
  misc_feature (1146)..(1147): n is a, c, g, or t
  misc_feature (1153)..(1153): n is a, c, g, or t
  misc_feature (1155)..(1155): n is a, c, g, or t
  misc_feature (1162)..(1162): n is a, c, g, or t
  misc_feature (1164)..(1164): n is a, c, g, or t
  misc_feature (1171)..(1174): n is a, c, g, or t
  misc_feature (1183)..(1183): n is a, c, g, or t
  misc_feature (1187)..(1187): n is a, c, g, or t
  misc_feature (1190)..(1191): n is a, c, g, or t
  misc_feature (1194)..(1194): n is a, c, g, or t
  misc_feature (1196)..(1196): n is a, c, g, or t
  misc_feature (1200)..(1200): n is a, c, g, or t
  misc_feature (1205)..(1205): n is a, c, g, or t
  misc_feature (1207)..(1207): n is a, c, g, or t
  misc_feature (1210)..(1210): n is a, c, g, or t
  misc_feature (1215)..(1216): n is a, c, g, or t
  misc_feature (1221)..(1222): n is a, c, g, or t
  misc_feature (1226)..(1226): n is a, c, g, or t
  misc_feature (1228)..(1228): n is a, c, g, or t
  misc_feature (1233)..(1235): n is a, c, g, or t
  misc_feature (1238)..(1238): n is a, c, g, or t
  misc_feature (1241)..(1242): n is a, c, g, or t
  misc_feature (1250)..(1253): n is a, c, g, or t
  misc_feature (1255)..(1255): n is a, c, g, or t
  misc_feature (1257)..(1258): n is a, c, g, or t
  misc_feature (1263)..(1263): n is a, c, g, or t
  misc_feature (1265)..(1265): n is a, c, g, or t
  misc_feature (1271)..(1271): n is a, c, g, or t
  misc_feature (1275)..(1275): n is a, c, g, or t
  misc_feature (1278)..(1280): n is a, c, g, or t
  misc_feature (1283)..(1283): n is a, c, g, or t
  misc_feature (1286)..(1286): n is a, c, g, or t
  misc_feature (1290)..(1292): n is a, c, g, or t
  misc_feature (1294)..(1295): n is a, c, g, or t
  misc_feature (1297)..(1298): n is a, c, g, or t
  misc_feature (1300)..(1300): n is a, c, g, or t
  misc_feature (1302)..(1304): n is a, c, g, or t
  misc_feature (1312)..(1312): n is a, c, g, or t
  misc_feature (1316)..(1316): n is a, c, g, or t
  misc_feature (1318)..(1318): n is a, c, g, or t
  misc_feature (1320)..(1320): n is a, c, g, or t
  misc_feature (1323)..(1323): n is a, c, g, or t
  misc_feature (1328)..(1328): n is a, c, g, or t
  misc_feature (1333)..(1334): n is a, c, g, or t
  misc_feature (1336)..(1336): n is a, c, g, or t
  misc_feature (1338)..(1338): n is a, c, g, or t
  misc_feature (1340)..(1350): n is a, c, g, or t
tagagaaattactatgagaggatcgcatcaccatcaccatcacggatcctatttaggtgacactatagaatcgtcgacccacgcgtccgggtcccgcgtggctgcgcgcggcgctctgggagtacgacatggcgcgcgagctgcgggcgctgctgctgtggggccgccgcctgcggcctttgctgcgggcgccggcgctggcggccgtgccgggaggaaaaccaattctgtgtcctcggaggaccacagcccagttgggccccaggcgaaacccagcctggagcttgcaggcaggacgactgttcagcacgcagaccgccgaggacaaggaggaacccctgcactcgattatcagcagcacagagagcgtgcagggttccacttccaaacatgagttccaggccgagacaaagaagcttttggacattgttgcccggtccctgtactcagaaaaagaggtgtttatacgggagctgatctccaatgccagcgatgccttggaaaaactgcgtcacaaactggtgtctgacggccaagcactgccagaaatggagattcacttgcagaccaatgccgagaaaggcaccatcaccatccaggatactggtatcgggatgacacaggaagagctggtgtccaacctggggacgattgccagatcggggtcaaaggccttcctggatgctctgcagaaccaggctgaggccagcagcaagatcatcggccagtttggagtgggtttctactcagctttcatggtggctgacagagtggaggtctattcccgctcggcagccccggggagcctgggttaccagtggctttcanatggttctggagtgtttgaaatcgccgaagcttcgggagtnaaancgggacaaaaatcatcatccacctgaaatccgactgcaaggagttttccagcgagncccgggtgcnaaatgtggtaacnaaataaacaacttcgtcagcttcccctngtacttnaanggaaggngnatgaacaccntngcaggccatctggaatgaagggaccccaagaatgtccntgaattggcaaacatnaagnanttntaccnnttanntnncgnnaggttnaanaaaaaanccccnntaaanccttggaataaaaaaaaggaaannncnnttaaantncgaaaantnttttaannnncccaaaatnaaanccnnccntntttnaattnanccnggaanntgggnncccncnttttnnnttnaannccccaaannnntntnncaaananggcccngaantcnnnccnaangggnnncnntnncncnnngggggggnaaangnanaanttccntaacnncncngnnnnnnnnnnnaa

SEQ ID NO: 581 - DNA, 1200 bp, Homo Sapiens
  misc_feature (2)..(2): n is a, c, g, or t
  misc_feature (16)..(17): n is a, c, g, or t
  misc_feature (91)..(91): n is a, c, g, or t
  misc_feature (822)..(822): n is a, c, g, or t
  misc_feature (923)..(923): n is a, c, g, or t
  misc_feature (948)..(948): n is a, c, g, or t
  misc_feature (1014)..(1014): n is a, c, g, or t
  misc_feature (1028)..(1028): n is a, c, g, or t
  misc_feature (1040)..(1040): n is a, c, g, or t
  misc_feature (1060)..(1060): n is a, c, g, or t
  misc_feature (1065)..(1065): n is a, c, g, or t
  misc_feature (1068)..(1068): n is a, c, g, or t
  misc_feature (1081)..(1081): n is a, c, g, or t
  misc_feature (1084)..(1084): n is a, c, g, or t
  misc_feature (1095)..(1095): n is a, c, g, or t
  misc_feature (1098)..(1098): n is a, c, g, or t
  misc_feature (1106)..(1106): n is a, c, g, or t
  misc_feature (1110)..(1110): n is a, c, g, or t
  misc_feature (1122)..(1122): n is a, c, g, or t
  misc_feature (1127)..(1127): n is a, c, g, or t
  misc_feature (1132)..(1132): n is a, c, g, or t
  misc_feature (1150)..(1150): n is a, c, g, or t
  misc_feature (1155)..(1155): n is a, c, g, or t
  misc_feature (1172)..(1172): n is a, c, g, or t
  misc_feature (1185)..(1185): n is a, c, g, or t
  misc_feature (1187)..(1187): n is a, c, g, or t
  misc_feature (1189)..(1189): n is a, c, g, or t
  misc_feature (1193)..(1193): n is a, c, g, or t
tngaggaaaattactnngagagggatgcattcaccatcaccatcacggatcctatttagggtgacactatagaatcgtcgacccacgccgntccgaggagtttcgtgtggaacccgaggacgcaccagtttatgggccgcaccgggaccagctgggcctttatcctcctcttctacctcgttttttatgggttcctcaccgccatgttcaccctcaccatgtgggtgatgctgcagactgtctccgaccatacccccaagtaccaggaccgactggccacaccgggcttgatgattcgccccaagactgagaaccttgatgtcattgtcaatgtcagtgacactgaaagctgggaccagcatgttcagaagctcaacaagttcttggagccttacaacgactctatccaagcccaaaagaatgatgtctgccgccctgggcgctattactaacagccagataatggagtcctcaactaccccaaacgtgcctgccaattcaaccggacccagctgggcaactgctccggcattggggactccacccactatggttacagcactgggcagccctgtgtcttcatcaagatgaaccgggtcatcaacttctatgcaggagcaaaccagagcatgaatgttacctgtgctgggaagcgagatgaagatgctgagaatctcggcaacttcgtcatgttccccgccaacggcaacatcgacctcatgtacttcccctactatggcaaaaagttccacgtgaactacacacagcccctggtggctgtgaagttcctgaatgtgacccccaacgtggaggtgaatgtanaatgtcgcatcaacgccgccaacatcgccacagacgatgagcgagacaagttcgccggccgcgtggccttcaaactccgcatcaacaaaacctgaggcccnttcctcccacccatctctctcctgnggatgctcctggaatgtcctgacctgcctgatcctccctcacccccccaaagtatttttgaaacanaactatgactgtcngaacctcaatcnttttcttgatttccacccanctgantcnatggggtccgtcntcnctttccacaanttncccaactnaatnaatcaaaagganctggntaaanggccaaaagaatagaacnttcanttcggttaactggaaanatcccccccggcngnantccngaaataa

SEQ ID NO: 582 - DNA, 1373 bp, Homo Sapiens
  misc_feature (2)..(2): n is a, c, g, or t
  misc_feature (743)..(743): n is a, c, g, or t
  misc_feature (775)..(775): n is a, c, g, or t
  misc_feature (783)..(783): n is a, c, g, or t
  misc_feature (787)..(787): n is a, c, g, or t
  misc_feature (792)..(793): n is a, c, g, or t
  misc_feature (815)..(815): n is a, c, g, or t
  misc_feature (830)..(830): n is a, c, g, or t
  misc_feature (840)..(840): n is a, c, g, or t
  misc_feature (846)..(846): n is a, c, g, or t
  misc_feature (850)..(851): n is a, c, g, or t
  misc_feature (864)..(864): n is a, c, g, or t
  misc_feature (869)..(869): n is a, c, g, or t
  misc_feature (877)..(877): n is a, c, g, or t
  misc_feature (885)..(885): n is a, c, g, or t
  misc_feature (894)..(894): n is a, c, g, or t
  misc_feature (899)..(899): n is a, c, g, or t
  misc_feature (904)..(904): n is a, c, g, or t
  misc_feature (908)..(909): n is a, c, g, or t
  misc_feature (915)..(915): n is a, c, g, or t
  misc_feature (917)..(917): n is a, c, g, or t
  misc_feature (920)..(920): n is a, c, g, or t
  misc_feature (922)..(922): n is a, c, g, or t
  misc_feature (926)..(926): n is a, c, g, or t
  misc_feature (928)..(929): n is a, c, g, or t
  misc_feature (932)..(932): n is a, c, g, or t
  misc_feature (934)..(934): n is a, c, g, or t
  misc_feature (937)..(937): n is a, c, g, or t
  misc_feature (940)..(940): n is a, c, g, or t
  misc_feature (947)..(947): n is a, c, g, or t
  misc_feature (951)..(951): n is a, c, g, or t
  misc_feature (958)..(958): n is a, c, g, or t
  misc_feature (962)..(963): n is a, c, g, or t
  misc_feature (968)..(968): n is a, c, g, or t
  misc_feature (976)..(978): n is a, c, g, or t
  misc_feature (985)..(985): n is a, c, g, or t
  misc_feature (989)..(990): n is a, c, g, or t
  misc_feature (993)..(998): n is a, c, g, or t
  misc_feature (1000)..(1002): n is a, c, g, or t
  misc_feature (1004)..(1005): n is a, c, g, or t
  misc_feature (1007)..(1008): n is a, c, g, or t
  misc_feature (1010)..(1011): n is a, c, g, or t
  misc_feature (1014)..(1014): n is a, c, g, or t
  misc_feature (1018)..(1019): n is a, c, g, or t
  misc_feature (1022)..(1023): n is a, c, g, or t
  misc_feature (1026)..(1026): n is a, c, g, or t
  misc_feature (1028)..(1029): n is a, c, g, or t
  misc_feature (1031)..(1031): n is a, c, g, or t
  misc_feature (1035)..(1038): n is a, c, g, or t
  misc_feature (1040)..(1041): n is a, c, g, or t
  misc_feature (1043)..(1045): n is a, c, g, or t
  misc_feature (1050)..(1051): n is a, c, g, or t
  misc_feature (1053)..(1053): n is a, c, g, or t
  misc_feature (1057)..(1058): n is a, c, g, or t
  misc_feature (1062)..(1064): n is a, c, g, or t
  misc_feature (1069)..(1069): n is a, c, g, or t
  misc_feature (1072)..(1073): n is a, c, g, or t
  misc_feature (1075)..(1076): n is a, c, g, or t
  misc_feature (1082)..(1082): n is a, c, g, or t
  misc_feature (1091)..(1091): n is a, c, g, or t
  misc_feature (1098)..(1100): n is a, c, g, or t
  misc_feature (1103)..(1104): n is a, c, g, or t
  misc_feature (1107)..(1107): n is a, c, g, or t
  misc_feature (1110)..(1114): n is a, c, g, or t
  misc_feature (1116)..(1116): n is a, c, g, or t
  misc_feature (1119)..(1121): n is a, c, g, or t
  misc_feature (1124)..(1124): n is a, c, g, or t
  misc_feature (1127)..(1127): n is a, c, g, or t
  misc_feature (1131)..(1131): n is a, c, g, or t
  misc_feature (1133)..(1133): n is a, c, g, or t
  misc_feature (1135)..(1137): n is a, c, g, or t
  misc_feature (1141)..(1142): n is a, c, g, or t
  misc_feature (1146)..(1151): n is a, c, g, or t
  misc_feature (1153)..(1154): n is a, c, g, or t
  misc_feature (1156)..(1163): n is a, c, g, or t
  misc_feature (1166)..(1166): n is a, c, g, or t
  misc_feature (1168)..(1175): n is a, c, g, or t
  misc_feature (1178)..(1178): n is a, c, g, or t
  misc_feature (1183)..(1184): n is a, c, g, or t
  misc_feature (1187)..(1193): n is a, c, g, or t
  misc_feature (1195)..(1205): n is a, c, g, or t
  misc_feature (1209)..(1221): n is a, c, g, or t
  misc_feature (1224)..(1227): n is a, c, g, or t
  misc_feature (1229)..(1236): n is a, c, g, or t
  misc_feature (1242)..(1245): n is a, c, g, or t
  misc_feature (1247)..(1254): n is a, c, g, or t
  misc_feature (1256)..(1274): n is a, c, g, or t
  misc_feature (1276)..(1280): n is a, c, g, or t
  misc_feature (1283)..(1297): n is a, c, g, or t
  misc_feature (1300)..(1300): n is a, c, g, or t
  misc_feature (1302)..(1304): n is a, c, g, or t
  misc_feature (1306)..(1306): n is a, c, g, or t
  misc_feature (1308)..(1315): n is a, c, g, or t
  misc_feature (1319)..(1327): n is a, c, g, or t
  misc_feature (1330)..(1367): n is a, c, g, or t
  misc_feature (1369)..(1370): n is a, c, g, or t
  misc_feature (1372)..(1373): n is a, c, g, or t
antagagaaattactatgagaggatcgcatcaccatcaccatcacggatcctatttaggtgacactatagaatcgtcgacccacgcgtccgcccacgcgtccgcccacgcgtccggcccccagtccgctgctgcccctccctttcaccttccgtccagcactaagggagtctggccacggcctaatataggagggcttgtgggaggagacacccaccccctctttctgcacctctcccctcttccatgccacccccaggccaggagccaccacagccctgtctgtgactctcagctcccgaggctgggctcttccccagggaagctgcatgaccatggccacatacaggaggtaggagacagaggcctccacggtggacgatcgtggcgtgaagtccacgttgaccacgttgtcggtgctgggggagcggatgaaggccagggacccgcggcgctctccctgtggtcaggaagcagcccggagaccctaaaactccattggcctcatgtccagaactgaatcaggttcagctcgtggaagacattcaggatccggtctcgagacttctgggccgaccgtctcatgaggaccctgctgaggaacttcctgtcgaagtgggaccacctgtagggacagaccttgggtgtgagcctcaggcgcgtttaaaatgagggaagcagcccctgccacacgcccaggccgtccgccgttctcccgcctgtctgttggatggaggccgttanacgcatatgaaactgcatgccgcctcctccanagggtggntcangacanncctaaggaaattaaagtattcnctggttatccggatnaaaaaggganggtggnctgnncggaattaaaagnaaaantctggggnaaaaggangtgaatgcntgtcntttgnaaanngggtgnanccncnaaancnnccntncanggnaaagggngggncccgggngaannttgtntgtttaannnttggggnaggnnccnnnnnnannnanngnnannttntctnntannggntnnantttnnnncnnannnaaaanntnaaanntaannnaaagnttnntnnctttcnaaaaacccnggaaagnnnccnnggnaannnnnanaannnggnaantggnancnnnaaannaaannnnnngnngnnnnnnnnaanannnnnnnnaanttttnnaannnnnnngnnnnnnnnnnngggnnnnnnnnnnnnnaannnnannnnnnnnaaaaannnnannnnnnnnannnnnnnnnnnnnnnnnnngnnnnnaannnnnnnnnnnnnnnttnannnanannnnnnnnattnnnnnnnnnaannnnnnnnnnnnnnnnnnnnnnnnnnnnnnnnnnnnnnannann

SEQ ID NO: 583 - DNA, 1343 bp, Homo Sapiens
  misc_feature (923)..(923): n is a, c, g, or t
  misc_feature (926)..(926): n is a, c, g, or t
  misc_feature (984)..(984): n is a, c, g, or t
  misc_feature (992)..(992): n is a, c, g, or t
  misc_feature (1001)..(1001): n is a, c, g, or t
  misc_feature (1005)..(1005): n is a, c, g, or t
  misc_feature (1010)..(1010): n is a, c, g, or t
  misc_feature (1013)..(1013): n is a, c, g, or t
  misc_feature (1018)..(1018): n is a, c, g, or t
  misc_feature (1029)..(1029): n is a, c, g, or t
  misc_feature (1031)..(1031): n is a, c, g, or t
  misc_feature (1045)..(1045): n is a, c, g, or t
  misc_feature (1048)..(1048): n is a, c, g, or t
  misc_feature (1054)..(1054): n is a, c, g, or t
  misc_feature (1069)..(1069): n is a, c, g, or t
  misc_feature (1077)..(1077): n is a, c, g, or t
  misc_feature (1083)..(1083): n is a, c, g, or t
  misc_feature (1096)..(1097): n is a, c, g, or t
  misc_feature (1106)..(1106): n is a, c, g, or t
  misc_feature (1119)..(1119): n is a, c, g, or t
  misc_feature (1123)..(1123): n is a, c, g, or t
  misc_feature (1131)..(1131): n is a, c, g, or t
  misc_feature (1133)..(1133): n is a, c, g, or t
  misc_feature (1136)..(1137): n is a, c, g, or t
  misc_feature (1140)..(1140): n is a, c, g, or t
  misc_feature (1147)..(1147): n is a, c, g, or t
  misc_feature (1157)..(1157): n is a, c, g, or t
  misc_feature (1160)..(1160): n is a, c, g, or t
  misc_feature (1167)..(1167): n is a, c, g, or t
  misc_feature (1177)..(1177): n is a, c, g, or t
  misc_feature (1183)..(1183): n is a, c, g, or t
  misc_feature (1192)..(1192): n is a, c, g, or t
  misc_feature (1203)..(1203): n is a, c, g, or t
  misc_feature (1205)..(1205): n is a, c, g, or t
  misc_feature (1208)..(1208): n is a, c, g, or t
  misc_feature (1211)..(1211): n is a, c, g, or t
  misc_feature (1213)..(1215): n is a, c, g, or t
  misc_feature (1225)..(1226): n is a, c, g, or t
  misc_feature (1229)..(1229): n is a, c, g, or t
  misc_feature (1232)..(1232): n is a, c, g, or t
  misc_feature (1234)..(1234): n is a, c, g, or t
  misc_feature (1236)..(1239): n is a, c, g, or t
  misc_feature (1246)..(1246): n is a, c, g, or t
  misc_feature (1248)..(1250): n is a, c, g, or t
  misc_feature (1259)..(1259): n is a, c, g, or t
  misc_feature (1262)..(1263): n is a, c, g, or t
  misc_feature (1265)..(1265): n is a, c, g, or t
  misc_feature (1267)..(1268): n is a, c, g, or t
  misc_feature (1271)..(1271): n is a, c, g, or t
  misc_feature (1274)..(1275): n is a, c, g, or t
  misc_feature (1280)..(1280): n is a, c, g, or t
  misc_feature (1282)..(1282): n is a, c, g, or t
  misc_feature (1286)..(1290): n is a, c, g, or t
  misc_feature (1293)..(1293): n is a, c, g, or t
  misc_feature (1295)..(1295): n is a, c, g, or t
  misc_feature (1301)..(1301): n is a, c, g, or t
  misc_feature (1304)..(1304): n is a, c, g, or t
  misc_feature (1309)..(1309): n is a, c, g, or t
  misc_feature (1311)..(1312): n is a, c, g, or t
  misc_feature (1314)..(1315): n is a, c, g, or t
  misc_feature (1317)..(1317): n is a, c, g, or t
  misc_feature (1333)..(1334): n is a, c, g, or t
  misc_feature (1340)..(1340): n is a, c, g, or t
  misc_feature (1343)..(1343): n is a, c, g, or t
gagaaattactatgagaggatcgcatcaccatcaccatcacggatcctatttaggtgacactatagaatcgtcgacccacgcgtccgcttttagcaccagtgtgggaaatgaggacgccaggacagcctggcccgaattacaacagagccatgctgttaatcagctcaaagatttgttgcgccaacaagcagataaggaaagtgaagtatctccgtcaagaagaagaaaaatgtcccccttgaggtcattagaacatgaggaaaccaatatgcctactatgcacgaccttgttcatactattaatgaccagtctcaatatattcatcatttagaggcagaagttaagttctgcaaggaggaactctctggaatgaaaaataaaatacaagtagttgtgcttgaaaacgaagggctccagcaacagctaaaatctcaaagacaagaggagacactgagggaacaaacacttctggatgcatccggaaacatgcacaattcttggattacaacaggtgaagattctggggtgggcgaaacctccaaaagaccattttcccatgacaatgcagattttggcaaagctgcatctgctggtgagcagctagaactggagaagctaaaacttacttatgaggaaaagtgtgaaattgaggaatcccaattgaagtttttgaggaacgacttagctgaatatcagagaacttgtgaagatcttaaagagcaactaaagcataaagaatttcttctggctgctaatacttgtaaccgtgttggtggtctttgtttgaaatgtgctcagcatgaagctgttctttcccaaacccatactaatgttcatatgcagaccatcgaaagactggttaaagaaagagatgacttgatgtctgcactagtttccgtaaggagcagcttggcagatacncancaaagagaagcaagtgcttatgaacaggtgaaacaagttttgcaaatatctgaggaanccattttngaaaaaccnagcnccctnccnaatanccaaacgtaancnatggaattgatggnaancacccnaattgacggaatcantctaatgntcctcnctgacaaatgggnnaagaaaaanggggaacatggancccngggaaaantngcnnccntaaaaanaaggaatccnatnttttgcnggaacatgcntggganccggaaacngttttcctttncnaantancnnnggaaaaaaannccnaancngnnnntttcttncnnnaaagggggnccnnangnntanaannttttngncccnnnnnggnancccccnacnggggncnncnntngagaaaaagggggggnnccgggnaan

SEQ ID NO: 584 - DNA, 1314 bp, Homo Sapiens
  misc_feature (839)..(839): n is a, c, g, or t
  misc_feature (914)..(914): n is a, c, g, or t
  misc_feature (963)..(963): n is a, c, g, or t
  misc_feature (1003)..(1003): n is a, c, g, or t
  misc_feature (1006)..(1006): n is a, c, g, or t
  misc_feature (1015)..(1015): n is a, c, g, or t
  misc_feature (1017)..(1017): n is a, c, g, or t
  misc_feature (1025)..(1025): n is a, c, g, or t
  misc_feature (1035)..(1035): n is a, c, g, or t
  misc_feature (1038)..(1038): n is a, c, g, or t
  misc_feature (1041)..(1041): n is a, c, g, or t
  misc_feature (1048)..(1048): n is a, c, g, or t
  misc_feature (1065)..(1065): n is a, c, g, or t
  misc_feature (1072)..(1072): n is a, c, g, or t
  misc_feature (1077)..(1077): n is a, c, g, or t
  misc_feature (1082)..(1082): n is a, c, g, or t
  misc_feature (1091)..(1091): n is a, c, g, or t
  misc_feature (1107)..(1107): n is a, c, g, or t
  misc_feature (1114)..(1114): n is a, c, g, or t
  misc_feature (1116)..(1116): n is a, c, g, or t
  misc_feature (1121)..(1121): n is a, c, g, or t
  misc_feature (1123)..(1123): n is a, c, g, or t
  misc_feature (1150)..(1150): n is a, c, g, or t
  misc_feature (1154)..(1154): n is a, c, g, or t
  misc_feature (1158)..(1158): n is a, c, g, or t
  misc_feature (1166)..(1166): n is a, c, g, or t
  misc_feature (1168)..(1168): n is a, c, g, or t
  misc_feature (1173)..(1173): n is a, c, g, or t
  misc_feature (1175)..(1175): n is a, c, g, or t
  misc_feature (1178)..(1178): n is a, c, g, or t
  misc_feature (1180)..(1182): n is a, c, g, or t
  misc_feature (1184)..(1184): n is a, c, g, or t
  misc_feature (1188)..(1190): n is a, c, g, or t
  misc_feature (1193)..(1193): n is a, c, g, or t
  misc_feature (1195)..(1200): n is a, c, g, or t
  misc_feature (1205)..(1205): n is a, c, g, or t
  misc_feature (1211)..(1211): n is a, c, g, or t
  misc_feature (1217)..(1217): n is a, c, g, or t
  misc_feature (1223)..(1223): n is a, c, g, or t
  misc_feature (1226)..(1226): n is a, c, g, or t
  misc_feature (1228)..(1228): n is a, c, g, or t
  misc_feature (1234)..(1234): n is a, c, g, or t
  misc_feature (1236)..(1236): n is a, c, g, or t
  misc_feature (1244)..(1244): n is a, c, g, or t
  misc_feature (1246)..(1246): n is a, c, g, or t
  misc_feature (1249)..(1249): n is a, c, g, or t
  misc_feature (1252)..(1252): n is a, c, g, or t
  misc_feature (1257)..(1258): n is a, c, g, or t
  misc_feature (1260)..(1263): n is a, c, g, or t
  misc_feature (1266)..(1266): n is a, c, g, or t
  misc_feature (1270)..(1273): n is a, c, g, or t
  misc_feature (1276)..(1277): n is a, c, g, or t
  misc_feature (1279)..(1281): n is a, c, g, or t
  misc_feature (1285)..(1285): n is a, c, g, or t
  misc_feature (1295)..(1295): n is a, c, g, or t
  misc_feature (1298)..(1298): n is a, c, g, or t
  misc_feature (1303)..(1303): n is a, c, g, or t
  misc_feature (1307)..(1307): n is a, c, g, or t
  misc_feature (1312)..(1314): n is a, c, g, or t
gagaaattactatgagaggatcgcatcaccatcaccatcacggatcctatttaggtgacactatagaatcgtcgacccacgcgtccgatttaatccaggaactgcgaagaggatctcaagcagccaatatttactgcatcaacttcaatcaggatgcgtccctcatctgcgtatccagcgaccacggcacagtgcatatttttgcagctgaagatccaaaaaggaataaacagtccagtttggcctcagccagtttccttccaaaatacttcagttccaagtggagtttctccaagtttcaggttccctcaggctctccgtgcatttgtgcctttggaacagagccaaacgccgtcattgcaatttgtgcagacggcagctactacaaattcctgttcaaccccaagggggagtgcatccgagatgtctacgcgcagtttctagagatgaccgatgacaagctgtgactccagctgggggcgccacagcacccaccacctgccgccttcagactctcggggctggtgccagtgccccaggggcctcctgggccacgggctggaggggctgcccagggaccttggtctcgaagccatacgtggttgtctgctttcctaaggactcccatttccagtattaaagagagaatcatcatcaaggcaccgtaggtaactcagtggctgtgaccagctcgactggcggccactggctgttcccatgagttcagctgtgacgttagcttcagtggctccgccgcatcctcacactgacgggggctccatacggacctggggactgggctgagagggtggacgagttcaggtttgtttttgcagcanattccgtcgttcttactgagtctgcagcgggggagtgaacaagtgtgcagatgtaagttcttacatgataagcanattgaatacaacaccagcagcttgccttaaaaaaaggaaaaggaattcnttttcccgcccgaacatgaaaaaaacgacctgacctgtanaanaaacacagngngaatgttncccctcgggnganccnagcctgnggtcttctccgtacccncaacggnggtcntctgngcccgggangtcccctggggcccgnggggggngnccccngnccccgttggggccattaaaaagggggnaaancccnggcccttntnaaaancnaancnnncnaccnnnggngnnnnnnggggngggaangggggncccccnggntnaatttngnaaaaaccngnttnccnggttnngnnnnggnaaannnnaanngnnncccnaattttaaanttnttttngggnaaaannn

SEQ ID NO: 585 - DNA, 1316 bp, Homo Sapiens
  misc_feature (830)..(830): n is a, c, g, or t
  misc_feature (907)..(907): n is a, c, g, or t
  misc_feature (931)..(931): n is a, c, g, or t
  misc_feature (938)..(938): n is a, c, g, or t
  misc_feature (965)..(965): n is a, c, g, or t
  misc_feature (971)..(971): n is a, c, g, or t
  misc_feature (996)..(996): n is a, c, g, or t
  misc_feature (1001)..(1001): n is a, c, g, or t
  misc_feature (1007)..(1007): n is a, c, g, or t
  misc_feature (1019)..(1019): n is a, c, g, or t
  misc_feature (1021)..(1021): n is a, c, g, or t
  misc_feature (1030)..(1030): n is a, c, g, or t
  misc_feature (1041)..(1041): n is a, c, g, or t
  misc_feature (1047)..(1047): n is a, c, g, or t
  misc_feature (1066)..(1066): n is a, c, g, or t
  misc_feature (1100)..(1100): n is a, c, g, or t
  misc_feature (1103)..(1103): n is a, c, g, or t
  misc_feature (1107)..(1107): n is a, c, g, or t
  misc_feature (1115)..(1115): n is a, c, g, or t
  misc_feature (1119)..(1119): n is a, c, g, or t
  misc_feature (1132)..(1132): n is a, c, g, or t
  misc_feature (1136)..(1137): n is a, c, g, or t
  misc_feature (1146)..(1147): n is a, c, g, or t
  misc_feature (1151)..(1151): n is a, c, g, or t
  misc_feature (1177)..(1177): n is a, c, g, or t
  misc_feature (1182)..(1182): n is a, c, g, or t
  misc_feature (1192)..(1192): n is a, c, g, or t
  misc_feature (1203)..(1204): n is a, c, g, or t
  misc_feature (1209)..(1209): n is a, c, g, or t
  misc_feature (1211)..(1211): n is a, c, g, or t
  misc_feature (1216)..(1216): n is a, c, g, or t
  misc_feature (1226)..(1226): n is a, c, g, or t
  misc_feature (1234)..(1234): n is a, c, g, or t
  misc_feature (1245)..(1247): n is a, c, g, or t
  misc_feature (1254)..(1254): n is a, c, g, or t
  misc_feature (1257)..(1257): n is a, c, g, or t
  misc_feature (1263)..(1263): n is a, c, g, or t
  misc_feature (1276)..(1278): n is a, c, g, or t
  misc_feature (1280)..(1280): n is a, c, g, or t
  misc_feature (1283)..(1283): n is a, c, g, or t
  misc_feature (1286)..(1286): n is a, c, g, or t
  misc_feature (1289)..(1289): n is a, c, g, or t
  misc_feature (1299)..(1300): n is a, c, g, or t
  misc_feature (1304)..(1305): n is a, c, g, or t
  misc_feature (1307)..(1307): n is a, c, g, or t
  misc_feature (1311)..(1311): n is a, c, g, or t
  misc_feature (1313)..(1314): n is a, c, g, or t
  misc_feature (1316)..(1316): n is a, c, g, or t
tagagaaattactatgagaggatcgcatcaccatcaccatcacggatcctatttaggtgacactatagaatcgtcgacccacgcgtccgctgaatgccatcgggttcaagaagaaaatgctaggcttaagaagaaaaaagagcagttgcagcaggaaatcgaagactggagtaaattacatgctgagctcagtgagcaaatcaaatcatttgagaagtctcagaaagatttggaagtagctcttactcacaaggatgataatattaatgctttgactaactgcattacacagttgaatctgttagagtgtgaatctgaatctgagggtcaataaaggtggaaatgattcagatgaattagcaaatggagaagtgggaggtgaccggaatgagaagatgaaaaatcaaattaagcagatgatggatgtctctcgggtataatcgtttttagagtcccataattgcctgtgaatacttttactatgcctcacttttatgaatacttgtctcttctgcaatttttagacacagactgcaatatcggtagttgaagaggatctaaagcttttacagcttaagctaagagcctccgtgtccactaaatgtaacctggaagaccaggtaaagaaattggaagatgaccgcaactcactacaagctgccaaagctggactggaagatgaatgcaaaaccttgaggcagaaagtggagattctgaatgagctctatcagcagaaggagatggctttgcaaaagaaactgagtcaagaagagtatgaacggcaagaaagagagcacaggctgtcagctgcagatgaaaaggcagtttcngctgcagaggaagtaaaaacttacaagcggagaattgaagaatggaggatgaattacagaagacagagcggtcattnaaaaaccagatcgctacccatganaaaaaangctcatgaaaactggctcaaagctcgngctgcnaaaagagctatagctgaaaaaaaanggaanctgccnatttgagacccnantttttaganttaccccaaanatggcnatgctgcaaaaaaacctgngatgtaaacccatgcccggaaaacccaatacccnaancccnccccgganaggnccccgaaccaaanggcnntttggcccnncccnggggaggggggaaaaggccccccccntgacngggacccccngggaaaccccnntgctncncccanccaaaaaatncccaaaangaatttggttnnngggcggnccncccccncccccagggcccnnngnccnggnaancccccccttnntccnnangggnanncn

SEQ ID NO: 586 - DNA, 1238 bp, Homo Sapiens
  misc_feature (710)..(710): n is a, c, g, or t
  misc_feature (728)..(728): n is a, c, g, or t
  misc_feature (763)..(763): n is a, c, g, or t
  misc_feature (784)..(784): n is a, c, g, or t
  misc_feature (796)..(796): n is a, c, g, or t
  misc_feature (851)..(851): n is a, c, g, or t
  misc_feature (871)..(871): n is a, c, g, or t
  misc_feature (892)..(892): n is a, c, g, or t
  misc_feature (909)..(909): n is a, c, g, or t
  misc_feature (919)..(920): n is a, c, g, or t
  misc_feature (922)..(922): n is a, c, g, or t
  misc_feature (925)..(925): n is a, c, g, or t
  misc_feature (928)..(929): n is a, c, g, or t
  misc_feature (932)..(932): n is a, c, g, or t
  misc_feature (939)..(940): n is a, c, g, or t
  misc_feature (948)..(949): n is a, c, g, or t
  misc_feature (959)..(960): n is a, c, g, or t
  misc_feature (963)..(963): n is a, c, g, or t
  misc_feature (968)..(968): n is a, c, g, or t
  misc_feature (971)..(971): n is a, c, g, or t
  misc_feature (974)..(974): n is a, c, g, or t
  misc_feature (982)..(982): n is a, c, g, or t
  misc_feature (994)..(995): n is a, c, g, or t
  misc_feature (999)..(1000): n is a, c, g, or t
  misc_feature (1002)..(1002): n is a, c, g, or t
  misc_feature (1004)..(1004): n is a, c, g, or t
  misc_feature (1007)..(1009): n is a, c, g, or t
  misc_feature (1012)..(1013): n is a, c, g, or t
  misc_feature (1015)..(1022): n is a, c, g, or t
  misc_feature (1026)..(1026): n is a, c, g, or t
  misc_feature (1029)..(1029): n is a, c, g, or t
  misc_feature (1034)..(1034): n is a, c, g, or t
  misc_feature (1037)..(1039): n is a, c, g, or t
  misc_feature (1042)..(1042): n is a, c, g, or t
  misc_feature (1044)..(1044): n is a, c, g, or t
  misc_feature (1046)..(1046): n is a, c, g, or t
  misc_feature (1051)..(1052): n is a, c, g, or t
  misc_feature (1056)..(1058): n is a, c, g, or t
  misc_feature (1060)..(1063): n is a, c, g, or t
  misc_feature (1068)..(1069): n is a, c, g, or t
  misc_feature (1074)..(1075): n is a, c, g, or t
  misc_feature (1077)..(1077): n is a, c, g, or t
  misc_feature (1083)..(1083): n is a, c, g, or t
  misc_feature (1085)..(1085): n is a, c, g, or t
  misc_feature (1087)..(1094): n is a, c, g, or t
  misc_feature (1096)..(1101): n is a, c, g, or t
  misc_feature (1105)..(1105): n is a, c, g, or t
  misc_feature (1107)..(1110): n is a, c, g, or t
  misc_feature (1117)..(1121): n is a, c, g, or t
  misc_feature (1123)..(1129): n is a, c, g, or t
  misc_feature (1132)..(1145): n is a, c, g, or t
  misc_feature (1148)..(1160): n is a, c, g, or t
  misc_feature (1163)..(1181): n is a, c, g, or t
  misc_feature (1183)..(1188): n is a, c, g, or t
  misc_feature (1190)..(1191): n is a, c, g, or t
  misc_feature (1194)..(1196): n is a, c, g, or t
  misc_feature (1198)..(1204): n is a, c, g, or t
  misc_feature (1206)..(1219): n is a, c, g, or t
  misc_feature (1222)..(1226): n is a, c, g, or t
  misc_feature (1229)..(1238): n is a, c, g, or t
agaaattactatgagaggatcgcatcaccatcaccatcacggatcctatttaggtgacactatagaatcgtcgacccacgcgtccggccaactctcgcactctgttcttccgccgctccgccgtcgcgtttctctgccggtcgcaatggaagaagagatcgccgcgctggtcattgacaatggctccggcatgtgcaaagctggttttgctggggacgacgctccccgagccgtgtttccttccatcgtcgggcgccccagacaccagggcgtcatggtgggcatgggccagaaggactcctacgtgggcgacgaggcccagagcaagcgtggcatcctgaccctgaagtaccccattgagcatggcatcgtcaccaactgggacgacatggagaagatctggcaccacaccttctacaacgagctgcgcgtggccccggaggagcacccagtgctgctgaccgaggcccccctgaaccccaaggccaacagagagaagatgactcaggtgaggctcggcagacgcccgtgctcctcccgtcctttccccagtcattttctgcccggcttgatttctgacatttaagtgtttctttcgctgttccaggctctgttcctctcccggcatttcctccctgaagcctccaggtttctcatttggtttctgcctgcgttcttttcttttctccacacatcacactggcatgcancatgttgtggcgtgtgancatggggtggccgtgggtctctgtccctgactaanccgccccttgtcccttctcanattatgtttganaccttcaacaccccggccatgtacgtggccatccaggccgtgctgtccctctacncctctgggcgcaccactggnattgtcatggactctggaaanggggtcacccacacggngcccatctannanggntannccntccccanncatcctgnntttggactgnntgncgganctnacnaatacctnagaaaatcctcnntgannangntannnttnncnnnnnnnnaaanggnaatcntgnnnaantnanaaaanntttnnnannnnccctnnaattnnanaaaaangncnnnnnnnntnnnnnntttntnnnnaaaaaannnnnannnnnnnaannnnnnnnnnnnnnttnnnnnnnnnnnnnttnnnnnnnnnnnnnnnnnnntnnnnnntnnttnnngnnnnnnnannnnnnnnnnnnnnaannnnnttnnnnnnnnnn

SEQ ID NO: 587 - DNA, 1386 bp, Homo Sapiens
  misc_feature (835)..(835): n is a, c, g, or t
  misc_feature (859)..(859): n is a, c, g, or t
  misc_feature (931)..(931): n is a, c, g, or t
  misc_feature (933)..(933): n is a, c, g, or t
  misc_feature (936)..(936): n is a, c, g, or t
  misc_feature (944)..(944): n is a, c, g, or t
  misc_feature (949)..(949): n is a, c, g, or t
  misc_feature (958)..(958): n is a, c, g, or t
  misc_feature (960)..(960): n is a, c, g, or t
  misc_feature (963)..(963): n is a, c, g, or t
  misc_feature (972)..(972): n is a, c, g, or t
  misc_feature (1009)..(1009): n is a, c, g, or t
  misc_feature (1015)..(1015): n is a, c, g, or t
  misc_feature (1028)..(1028): n is a, c, g, or t
  misc_feature (1042)..(1042): n is a, c, g, or t
  misc_feature (1047)..(1047): n is a, c, g, or t
  misc_feature (1052)..(1052): n is a, c, g, or t
  misc_feature (1061)..(1061): n is a, c, g, or t
  misc_feature (1063)..(1063): n is a, c, g, or t
  misc_feature (1073)..(1074): n is a, c, g, or t
  misc_feature (1084)..(1084): n is a, c, g, or t
  misc_feature (1086)..(1086): n is a, c, g, or t
  misc_feature (1095)..(1096): n is a, c, g, or t
  misc_feature (1098)..(1099): n is a, c, g, or t
  misc_feature (1107)..(1108): n is a, c, g, or t
  misc_feature (1110)..(1110): n is a, c, g, or t
  misc_feature (1116)..(1116): n is a, c, g, or t
  misc_feature (1126)..(1126): n is a, c, g, or t
  misc_feature (1132)..(1132): n is a, c, g, or t
  misc_feature (1135)..(1135): n is a, c, g, or t
  misc_feature (1143)..(1143): n is a, c, g, or t
  misc_feature (1159)..(1160): n is a, c, g, or t
  misc_feature (1162)..(1162): n is a, c, g, or t
  misc_feature (1169)..(1169): n is a, c, g, or t
  misc_feature (1171)..(1172): n is a, c, g, or t
  misc_feature (1176)..(1176): n is a, c, g, or t
  misc_feature (1180)..(1180): n is a, c, g, or t
  misc_feature (1183)..(1183): n is a, c, g, or t
  misc_feature (1190)..(1190): n is a, c, g, or t
  misc_feature (1203)..(1204): n is a, c, g, or t
  misc_feature (1208)..(1208): n is a, c, g, or t
  misc_feature (1210)..(1210): n is a, c, g, or t
  misc_feature (1213)..(1213): n is a, c, g, or t
  misc_feature (1236)..(1238): n is a, c, g, or t
  misc_feature (1246)..(1246): n is a, c, g, or t
  misc_feature (1254)..(1254): n is a, c, g, or t
  misc_feature (1256)..(1256): n is a, c, g, or t
  misc_feature (1259)..(1259): n is a, c, g, or t
  misc_feature (1263)..(1263): n is a, c, g, or t
  misc_feature (1265)..(1265): n is a, c, g, or t
  misc_feature (1269)..(1269): n is a, c, g, or t
  misc_feature (1272)..(1273): n is a, c, g, or t
  misc_feature (1284)..(1284): n is a, c, g, or t
  misc_feature (1290)..(1290): n is a, c, g, or t
  misc_feature (1297)..(1297): n is a, c, g, or t
  misc_feature (1304)..(1304): n is a, c, g, or t
  misc_feature (1310)..(1311): n is a, c, g, or t
  misc_feature (1314)..(1314): n is a, c, g, or t
  misc_feature (1316)..(1316): n is a, c, g, or t
  misc_feature (1318)..(1319): n is a, c, g, or t
  misc_feature (1332)..(1332): n is a, c, g, or t
  misc_feature (1334)..(1334): n is a, c, g, or t
  misc_feature (1337)..(1338): n is a, c, g, or t
  misc_feature (1346)..(1346): n is a, c, g, or t
  misc_feature (1349)..(1349): n is a, c, g, or t
  misc_feature (1355)..(1355): n is a, c, g, or t
  misc_feature (1358)..(1359): n is a, c, g, or t
  misc_feature (1361)..(1362): n is a, c, g, or t
  misc_feature (1367)..(1367): n is a, c, g, or t
  misc_feature (1369)..(1369): n is a, c, g, or t
  misc_feature (1371)..(1376): n is a, c, g, or t
  misc_feature (1380)..(1381): n is a, c, g, or t
  misc_feature (1383)..(1385): n is a, c, g, or t
attagagaaattactatgagaggatcgcatcaccatcaccatcacggatcctatttaggtgacactatagaatcgtcgacccacgcgtccgcccgaacctgccagaataggggatctcacccacccagttcagcagcgaggacacctgcagaaatacattcccaaagcaaggctgggcggccgtgtgaaggcagttttcttagctgtgattcccactgctgccattgtctgtgcaatcacatccagaagaagggtcacggttacatggatctgctgggaaaacaattagtggaaaagggggcaaatagagttaatggccgtttttggtaagcaatggcctcagttttgcttctgttttggatgaacaccaccacatagggcctgaatgtgaaagaagaccctctatttgtctgttccggggcagcctggtagtaaaacactgttgaatgggccacagtttcagcagaccatcaggtgaatgggaccagtctctcttcttccaaaatatcagaagttaaacacttggaacggagatttggccaagatgacccatttacaggctggactcagtccagagactatagagaaagctcgcctggaactgaatgaaaaccccgatgttttacatcaggatattcagcaagtcagggacatgatcatcaccaggcctgacattggatttttacgtacagatgatgccttcatcctgagatttctccgagccaggaagtttcaccaagcggatgcctttagactcctggctcagtatttccagtaccgccagctaaacctggacatgttcaaaaacttcaaggcagatgatcccggcattaanagggctctgatcgatgggttcccnggggtgctggaaaaccgagaccattacggcaggaaaaattcttttgctgtttgcagcccaattggggatcanantangaactccnttcanaaaaatccntncgngcccatccntgctgtcattggaaagtcctaatccaaaaatccgganccttcnaaaaaatgggctncctttttaaattanaaacnggaantaatttttncnttcaaaaaannccccccaaancngaaaccttnnannccttaaanngnccattnaaagggttgnaggaanacntttcccgnccccctttggaagaanncncttttgncnnccancccnggnaaatttnatgccccctaaanncccntnagncctttttttaaaaaaaaaaaccnnnaaacggantttcctgncnggnaaanantttnaannccccttccccncaaaancccccgnaattttncccccnnaantngnnaacctttcccctntnaannggaaattnggnccgaanttnncnnccccnanannnnnnaaannannnc

SEQ ID NO: 588 - DNA, 1393 bp, Homo Sapiens
  misc_feature (850)..(850): n is a, c, g, or t
  misc_feature (854)..(854): n is a, c, g, or t
  misc_feature (882)..(882): n is a, c, g, or t
  misc_feature (891)..(891): n is a, c, g, or t
  misc_feature (903)..(903): n is a, c, g, or t
  misc_feature (910)..(910): n is a, c, g, or t
  misc_feature (918)..(918): n is a, c, g, or t
  misc_feature (941)..(941): n is a, c, g, or t
  misc_feature (946)..(946): n is a, c, g, or t
  misc_feature (961)..(962): n is a, c, g, or t
  misc_feature (965)..(966): n is a, c, g, or t
  misc_feature (985)..(986): n is a, c, g, or t
  misc_feature (990)..(990): n is a, c, g, or t
  misc_feature (993)..(993): n is a, c, g, or t
  misc_feature (999)..(999): n is a, c, g, or t
  misc_feature (1013)..(1014): n is a, c, g, or t
  misc_feature (1023)..(1023): n is a, c, g, or t
  misc_feature (1027)..(1027): n is a, c, g, or t
  misc_feature (1029)..(1029): n is a, c, g, or t
  misc_feature (1031)..(1031): n is a, c, g, or t
  misc_feature (1041)..(1041): n is a, c, g, or t
  misc_feature (1059)..(1060): n is a, c, g, or t
  misc_feature (1064)..(1064): n is a, c, g, or t
  misc_feature (1073)..(1074): n is a, c, g, or t
  misc_feature (1076)..(1077): n is a, c, g, or t
  misc_feature (1084)..(1084): n is a, c, g, or t
  misc_feature (1100)..(1100): n is a, c, g, or t
  misc_feature (1103)..(1103): n is a, c, g, or t
  misc_feature (1106)..(1106): n is a, c, g, or t
  misc_feature (1110)..(1110): n is a, c, g, or t
  misc_feature (1114)..(1115): n is a, c, g, or t
  misc_feature (1126)..(1128): n is a, c, g, or t
  misc_feature (1132)..(1132): n is a, c, g, or t
  misc_feature (1135)..(1136): n is a, c, g, or t
  misc_feature (1138)..(1138): n is a, c, g, or t
  misc_feature (1147)..(1147): n is a, c, g, or t
  misc_feature (1153)..(1153): n is a, c, g, or t
  misc_feature (1155)..(1155): n is a, c, g, or t
  misc_feature (1158)..(1158): n is a, c, g, or t
  misc_feature (1160)..(1161): n is a, c, g, or t
  misc_feature (1173)..(1173): n is a, c, g, or t
  misc_feature (1176)..(1177): n is a, c, g, or t
  misc_feature (1179)..(1179): n is a, c, g, or t
  misc_feature (1183)..(1184): n is a, c, g, or t
  misc_feature (1186)..(1186): n is a, c, g, or t
  misc_feature (1194)..(1194): n is a, c, g, or t
  misc_feature (1199)..(1200): n is a, c, g, or t
  misc_feature (1205)..(1205): n is a, c, g, or t
  misc_feature (1208)..(1208): n is a, c, g, or t
  misc_feature (1212)..(1214): n is a, c, g, or t
  misc_feature (1219)..(1219): n is a, c, g, or t
  misc_feature (1222)..(1222): n is a, c, g, or t
  misc_feature (1224)..(1224): n is a, c, g, or t
  misc_feature (1234)..(1234): n is a, c, g, or t
  misc_feature (1239)..(1239): n is a, c, g, or t
  misc_feature (1247)..(1248): n is a, c, g, or t
  misc_feature (1251)..(1251): n is a, c, g, or t
  misc_feature (1253)..(1254): n is a, c, g, or t
  misc_feature (1264)..(1264): n is a, c, g, or t
  misc_feature (1266)..(1266): n is a, c, g, or t
  misc_feature (1269)..(1269): n is a, c, g, or t
  misc_feature (1279)..(1279): n is a, c, g, or t
  misc_feature (1283)..(1283): n is a, c, g, or t
  misc_feature (1286)..(1286): n is a, c, g, or t
  misc_feature (1290)..(1290): n is a, c, g, or t
  misc_feature (1293)..(1293): n is a, c, g, or t
  misc_feature (1297)..(1297): n is a, c, g, or t
  misc_feature (1300)..(1300): n is a, c, g, or t
  misc_feature (1305)..(1306): n is a, c, g, or t
  misc_feature (1308)..(1308): n is a, c, g, or t
  misc_feature (1311)..(1311): n is a, c, g, or t
  misc_feature (1314)..(1315): n is a, c, g, or t
  misc_feature (1319)..(1323): n is a, c, g, or t
  misc_feature (1325)..(1329): n is a, c, g, or t
  misc_feature (1331)..(1331): n is a, c, g, or t
  misc_feature (1351)..(1351): n is a, c, g, or t
  misc_feature (1356)..(1357): n is a, c, g, or t
  misc_feature (1359)..(1360): n is a, c, g, or t
  misc_feature (1363)..(1363): n is a, c, g, or t
  misc_feature (1365)..(1365): n is a, c, g, or t
  misc_feature (1368)..(1368): n is a, c, g, or t
  misc_feature (1370)..(1370): n is a, c, g, or t
  misc_feature (1374)..(1375): n is a, c, g, or t
  misc_feature (1377)..(1377): n is a, c, g, or t
  misc_feature (1379)..(1383): n is a, c, g, or t
agagaaattactatgagaggatcgcatcaccatcaccatcacggatcctatttaggtgacactatagaatcgtcgacccacgcgtccggcgcttctttgccaaaagtgacacctgagaccccttgtgaaaatgagtttgctgaaggcagtgccttgcttccaggcagcgaggctggcgtttctgtgcagcagggggctgcaagtcttcctctcggtggctgcagagttgtgagtgactctcgcttagcaaagactagagatggcctgtccgtgccaaaacacagtgccgggtccggagcagaagaatccaacagcagctccactgtgcagaagcagaatgagccagggctacagacagaggatgtgcagaagccaccacttcagatggacaacagcgtctttctagatgacgacagcaatcagccaatgcccgtgagccggttctttggaaacgttgagctcatgcaggacctcccacctgcgtcttcatcttgtccttcaatgagcagacgagagttcagaaaaatgcatttcagagccaaagatgatgatgatgacgacgacgatgatgcagaaatgtaggggccatacaaaataatgtccttgagtatttagtaccattaacaatttgacaatttagcacattacaagatttatataaaatgtatctccaagagaatgtcttaatcaaacttcagaactgacccatctaagtcaatagtgcaaagcacccaatacctgtggagggtgtactcatgggaactaaaactcaaaccatctttgaggttgcaaagctgctgtactgtgccaatgtcctttcttttttttttttttttttttttccttgganacanaatttctctcttgtcccccaggctggantgcaatggncgcaatctcggntcactgnaacctccnccctcctgggttcaagtgaatcnccctncctcacccccctgannaanntgggaattaaagggcatanncccnccncccccnacttagttttttgnnatttttaanaaancncngggggttttnccctggttgggccaaggnngggntcccaaacnncnnaacctcnggaaaacccccccccncanccncccnaaannggctggaattnnngggnccnnancccccattncccggncnagngnnctttttttaaancgnnanatanntnaaaaaggnttgannccccngcngggnnnggggnttnantaaaaagaanttttntaaaaaannccntnnccttcccccnanaantttggcaaanaaanttntttnccnaaanaanttgannanccnggnnaaannnnngnnnnntnaaaaaacttttttttttttngggannannttncntgnantttnnanannnnnaaaaaaaaaa

SEQ ID NO: 589 - DNA, 1294 bp, Homo Sapiens
  misc_feature (581)..(581): n is a, c, g, or t
  misc_feature (836)..(878): n is a, c, g, or t
  misc_feature (885)..(885): n is a, c, g, or t
  misc_feature (901)..(901): n is a, c, g, or t
  misc_feature (907)..(907): n is a, c, g, or t
  misc_feature (923)..(923): n is a, c, g, or t
  misc_feature (941)..(941): n is a, c, g, or t
  misc_feature (943)..(943): n is a, c, g, or t
  misc_feature (976)..(976): n is a, c, g, or t
  misc_feature (993)..(994): n is a, c, g, or t
  misc_feature (998)..(998): n is a, c, g, or t
  misc_feature (1003)..(1003): n is a, c, g, or t
  misc_feature (1006)..(1007): n is a, c, g, or t
  misc_feature (1034)..(1034): n is a, c, g, or t
  misc_feature (1037)..(1037): n is a, c, g, or t
  misc_feature (1040)..(1040): n is a, c, g, or t
  misc_feature (1046)..(1046): n is a, c, g, or t
  misc_feature (1053)..(1055): n is a, c, g, or t
  misc_feature (1064)..(1064): n is a, c, g, or t
  misc_feature (1069)..(1069): n is a, c, g, or t
  misc_feature (1080)..(1080): n is a, c, g, or t
  misc_feature (1112)..(1112): n is a, c, g, or t
  misc_feature (1121)..(1121): n is a, c, g, or t
  misc_feature (1135)..(1135): n is a, c, g, or t
  misc_feature (1141)..(1141): n is a, c, g, or t
  misc_feature (1147)..(1149): n is a, c, g, or t
  misc_feature (1152)..(1153): n is a, c, g, or t
  misc_feature (1162)..(1162): n is a, c, g, or t
  misc_feature (1173)..(1173): n is a, c, g, or t
  misc_feature (1178)..(1182): n is a, c, g, or t
  misc_feature (1184)..(1186): n is a, c, g, or t
  misc_feature (1189)..(1190): n is a, c, g, or t
  misc_feature (1193)..(1194): n is a, c, g, or t
  misc_feature (1197)..(1197): n is a, c, g, or t
  misc_feature (1201)..(1201): n is a, c, g, or t
  misc_feature (1213)..(1213): n is a, c, g, or t
  misc_feature (1218)..(1218): n is a, c, g, or t
  misc_feature (1223)..(1223): n is a, c, g, or t
  misc_feature (1225)..(1228): n is a, c, g, or t
  misc_feature (1231)..(1231): n is a, c, g, or t
  misc_feature (1236)..(1236): n is a, c, g, or t
  misc_feature (1238)..(1238): n is a, c, g, or t
  misc_feature (1240)..(1240): n is a, c, g, or t
  misc_feature (1253)..(1253): n is a, c, g, or t
  misc_feature (1257)..(1259): n is a, c, g, or t
  misc_feature (1270)..(1270): n is a, c, g, or t
  misc_feature (1273)..(1273): n is a, c, g, or t
  misc_feature (1277)..(1278): n is a, c, g, or t
  misc_feature (1280)..(1280): n is a, c, g, or t
agaaattactatgagaggatcgcatcaccatcaccatcacggatcctatttaggtgacactatagaatcgtcgacccacgcgtccgcgggcgctcacggtgcccgagctcacccagcagatgttcgactccaagaacatgatggccgcctgcgacccgcgccacggccgctacctgacggtggctgccatcttccggggccgcatgtccatgaaggaggtggacgagcagatgctcaacgtgcagaacaagaacagcagctacttcgtggagtggatccccaacaacgtgaagacggccgtgtgcgacatcccgccccgcggcctgaagatgtcggccaccttcatcggcaacagcacggccatccaggagctgttcaagcgcatctccgagcagttcacggccatgttccggcgcaaggccttcctgcactggtacacgggcgagggcatggacgagatggagttcaccgaggccgagagcaacatgaacgacctggtgtccgagtaccagcagtaccaggacgccacggccgacgaacaaggggagttcgaggaggaggagggcgaggacgaggcgtanatgcccccgcgagacgggttagggaaagcggaggaggaaagcgagggggtggggggcttcccgggacgataacctggcagtggaaggaaagaagcatggtctactttaggtgtgcgctgggtctctggtgctcttcactgttgcctgtcacttttttttccttttttgtaatattgatgacatcaatgtaacatttgagatatttctgaattactgttgtaatggctaaaatcacataaacgtttgtgtcggaannnnnnnnnnnnnnnnnnnnnnnnnnnnnnnnnnnnnnnnnnnaaggggnggccgctccctaaagngagtcntattaagcttaattanctgaacttggactcctgntnaaaaaatccagtaatgacctcaaaactcccttntggaattttttcaaaanncttnggttnccnnccgggggtttttttttttggggaaaantcnaancttaantttgggnnnaattttttnggggncctaagggaancttaaaatgggaaaaaaaaaaattccctgggnaattaaccncccgttttaaaatnttcccnaatggnnnttnnaaaaaaaantttttgggggnttttnnnnncnnnttnnccnnaanggtnccctaaaaaccnaaacngtttnannnnggnaaatnangncccttttttaaanaccnnnaaaaaaaaaanaancccnnanttttttttccggcc

SEQ ID NO: 590 - DNA, 1428 bp, Homo Sapiens
  misc_feature (703)..(703): n is a, c, g, or t
  misc_feature (814)..(814): n is a, c, g, or t
  misc_feature (894)..(894): n is a, c, g, or t
  misc_feature (924)..(924): n is a, c, g, or t
  misc_feature (963)..(963): n is a, c, g, or t
  misc_feature (965)..(965): n is a, c, g, or t
  misc_feature (971)..(971): n is a, c, g, or t
  misc_feature (979)..(979): n is a, c, g, or t
  misc_feature (985)..(985): n is a, c, g, or t
  misc_feature (1010)..(1010): n is a, c, g, or t
  misc_feature (1013)..(1013): n is a, c, g, or t
  misc_feature (1016)..(1016): n is a, c, g, or t
  misc_feature (1019)..(1019): n is a, c, g, or t
  misc_feature (1022)..(1023): n is a, c, g, or t
  misc_feature (1029)..(1029): n is a, c, g, or t
  misc_feature (1032)..(1032): n is a, c, g, or t
  misc_feature (1038)..(1038): n is a, c, g, or t
  misc_feature (1048)..(1048): n is a, c, g, or t
  misc_feature (1050)..(1050): n is a, c, g, or t
  misc_feature (1054)..(1054): n is a, c, g, or t
  misc_feature (1056)..(1056): n is a, c, g, or t
  misc_feature (1062)..(1062): n is a, c, g, or t
  misc_feature (1065)..(1065): n is a, c, g, or t
  misc_feature (1068)..(1068): n is a, c, g, or t
  misc_feature (1091)..(1091): n is a, c, g, or t
  misc_feature (1096)..(1096): n is a, c, g, or t
  misc_feature (1103)..(1103): n is a, c, g, or t
  misc_feature (1108)..(1108): n is a, c, g, or t
  misc_feature (1115)..(1115): n is a, c, g, or t
  misc_feature (1117)..(1117): n is a, c, g, or t
  misc_feature (1122)..(1122): n is a, c, g, or t
  misc_feature (1125)..(1125): n is a, c, g, or t
  misc_feature (1132)..(1133): n is a, c, g, or t
  misc_feature (1144)..(1144): n is a, c, g, or t
  misc_feature (1159)..(1159): n is a, c, g, or t
  misc_feature (1168)..(1170): n is a, c, g, or t
  misc_feature (1175)..(1176): n is a, c, g, or t
  misc_feature (1186)..(1186): n is a, c, g, or t
  misc_feature (1188)..(1188): n is a, c, g, or t
  misc_feature (1190)..(1191): n is a, c, g, or t
  misc_feature (1196)..(1197): n is a, c, g, or t
  misc_feature (1203)..(1203): n is a, c, g, or t
  misc_feature (1205)..(1206): n is a, c, g, or t
  misc_feature (1214)..(1214): n is a, c, g, or t
  misc_feature (1220)..(1221): n is a, c, g, or t
  misc_feature (1231)..(1231): n is a, c, g, or t
  misc_feature (1234)..(1236): n is a, c, g, or t
  misc_feature (1248)..(1248): n is a, c, g, or t
  misc_feature (1258)..(1258): n is a, c, g, or t
  misc_feature (1260)..(1260): n is a, c, g, or t
  misc_feature (1268)..(1268): n is a, c, g, or t
  misc_feature (1273)..(1273): n is a, c, g, or t
  misc_feature (1280)..(1280): n is a, c, g, or t
  misc_feature (1290)..(1290): n is a, c, g, or t
  misc_feature (1292)..(1292): n is a, c, g, or t
  misc_feature (1295)..(1297): n is a, c, g, or t
  misc_feature (1299)..(1300): n is a, c, g, or t
  misc_feature (1305)..(1305): n is a, c, g, or t
  misc_feature (1307)..(1309): n is a, c, g, or t
  misc_feature (1317)..(1317): n is a, c, g, or t
  misc_feature (1328)..(1328): n is a, c, g, or t
  misc_feature (1330)..(1330): n is a, c, g, or t
  misc_feature (1339)..(1339): n is a, c, g, or t
  misc_feature (1345)..(1345): n is a, c, g, or t
  misc_feature (1351)..(1351): n is a, c, g, or t
  misc_feature (1359)..(1360): n is a, c, g, or t
  misc_feature (1362)..(1362): n is a, c, g, or t
  misc_feature (1364)..(1364): n is a, c, g, or t
  misc_feature (1369)..(1369): n is a, c, g, or t
  misc_feature (1371)..(1371): n is a, c, g, or t
  misc_feature (1381)..(1382): n is a, c, g, or t
  misc_feature (1388)..(1388): n is a, c, g, or t
  misc_feature (1391)..(1392): n is a, c, g, or t
  misc_feature (1394)..(1395): n is a, c, g, or t
  misc_feature (1398)..(1399): n is a, c, g, or t
  misc_feature (1401)..(1402): n is a, c, g, or t
  misc_feature (1405)..(1405): n is a, c, g, or t
  misc_feature (1410)..(1410): n is a, c, g, or t
  misc_feature (1412)..(1413): n is a, c, g, or t
  misc_feature (1423)..(1423): n is a, c, g, or t
agaaattactatgagaggatcgcatcaccatcaccatcacggatcctatttaggtgacactatagaatcgtcgacccacgcgtccgaaatcggctgcgttcctctcggaacgcgccgcagaaggggtcctggtgacgagtcccgcgttctctccttgaatccactcgccagcccgccgccctctgccgccgcaccctgcacacccgcccctctcctgtgccaggaacttgctactaccagcaccatgccctaccaatatccagcactgaccccggagcagaagaaggagctgtctgacatcgctcaccgcatcgtggcacctggcaagggcatcctggctgcagatgagtccactgggagcattgccaagcggctgcagtccattggcaccgagaacaccgaggagaaccggcgcttctaccgccagctgctgctgacagctgacgaccgcgtgaacccctgcattgggggtgtcatcctcttccatgagacactctaccagaaggcggatgatgggcgtcccttcccccaagttatcaaatccaagggcggtgttgtgggcatcaaggtagacaagggcgtggtccccctggcagggacaaatggcgagactaccacccaagggttggatgggctgtctgagcgctgtgcccagtacaagaaggacggagctgacttcgccaagtggcgttgtgtgctgaanattggggaacacaccccctcagccctcgccatcatggaaaatgccaatgttctggcccgttatgccagtatctgccagcagaatggcattgtgcccatcgtggagcctganatcctccctgatgggggaccatgacttgaagcgctgccagtatgtgaccgaaaaggtgctggctgctgtctacaaggctntgaagtgaccaccacatctacctggaaggnaccttgctgaaagcccaacatggtcaaccccaaggccangnttggantcaaaaantttttntcatgaaggaaattggccatggggnacngtnaanagnnctggcnccncaaaantggccccccngntgtncnctgggnatnacnttccttgttctggaggccaaaantgaanaagaagngtccnttaaccntnaatgncantaaaaanngccccctggtnaaaccctggggcctngaatttttnnnaaggnnaaacctggangncnnttccnngaaagncnngggggggnaaaaannaaaacttaangtnnncaaaaaaaaatntaaagaaacntngcaaaaanttttntttaagnaaaaacctcnanggnnngnnggggntnnnaaaaatcnttttttttaanancctaaaagnagggtnttgggncccaaatnngncntcccntnttttaaaaanncccccnggnncnnggnntnnccnttttncnnaagggggggngggaa

SEQ ID NO: 591 - DNA, 1405 bp, Homo Sapiens
  misc_feature (575)..(575): n is a, c, g, or t
  misc_feature (787)..(787): n is a, c, g, or t
  misc_feature (817)..(817): n is a, c, g, or t
  misc_feature (848)..(848): n is a, c, g, or t
  misc_feature (872)..(872): n is a, c, g, or t
  misc_feature (919)..(919): n is a, c, g, or t
  misc_feature (950)..(951): n is a, c, g, or t
  misc_feature (963)..(963): n is a, c, g, or t
  misc_feature (965)..(965): n is a, c, g, or t
  misc_feature (970)..(971): n is a, c, g, or t
  misc_feature (975)..(975): n is a, c, g, or t
  misc_feature (979)..(979): n is a, c, g, or t
  misc_feature (1005)..(1005): n is a, c, g, or t
  misc_feature (1015)..(1016): n is a, c, g, or t
  misc_feature (1020)..(1020): n is a, c, g, or t
  misc_feature (1023)..(1023): n is a, c, g, or t
  misc_feature (1028)..(1028): n is a, c, g, or t
  misc_feature (1030)..(1030): n is a, c, g, or t
  misc_feature (1034)..(1034): n is a, c, g, or t
  misc_feature (1038)..(1038): n is a, c, g, or t
  misc_feature (1044)..(1044): n is a, c, g, or t
  misc_feature (1046)..(1046): n is a, c, g, or t
  misc_feature (1053)..(1053): n is a, c, g, or t
  misc_feature (1056)..(1056): n is a, c, g, or t
  misc_feature (1060)..(1061): n is a, c, g, or t
  misc_feature (1067)..(1067): n is a, c, g, or t
  misc_feature (1075)..(1075): n is a, c, g, or t
  misc_feature (1079)..(1079): n is a, c, g, or t
  misc_feature (1086)..(1086): n is a, c, g, or t
  misc_feature (1103)..(1104): n is a, c, g, or t
  misc_feature (1108)..(1108): n is a, c, g, or t
  misc_feature (1110)..(1110): n is a, c, g, or t
  misc_feature (1112)..(1112): n is a, c, g, or t
  misc_feature (1116)..(1116): n is a, c, g, or t
  misc_feature (1118)..(1119): n is a, c, g, or t
  misc_feature (1123)..(1123): n is a, c, g, or t
  misc_feature (1130)..(1131): n is a, c, g, or t
  misc_feature (1142)..(1142): n is a, c, g, or t
  misc_feature (1145)..(1145): n is a, c, g, or t
  misc_feature (1152)..(1152): n is a, c, g, or t
  misc_feature (1155)..(1155): n is a, c, g, or t
  misc_feature (1163)..(1165): n is a, c, g, or t
  misc_feature (1168)..(1168): n is a, c, g, or t
  misc_feature (1170)..(1170): n is a, c, g, or t
  misc_feature (1173)..(1174): n is a, c, g, or t
  misc_feature (1179)..(1179): n is a, c, g, or t
  misc_feature (1182)..(1183): n is a, c, g, or t
  misc_feature (1185)..(1185): n is a, c, g, or t
  misc_feature (1189)..(1191): n is a, c, g, or t
  misc_feature (1193)..(1193): n is a, c, g, or t
  misc_feature (1197)..(1199): n is a, c, g, or t
  misc_feature (1212)..(1212): n is a, c, g, or t
  misc_feature (1222)..(1224): n is a, c, g, or t
  misc_feature (1226)..(1232): n is a, c, g, or t
  misc_feature (1238)..(1238): n is a, c, g, or t
  misc_feature (1240)..(1242): n is a, c, g, or t
  misc_feature (1244)..(1245): n is a, c, g, or t
  misc_feature (1250)..(1251): n is a, c, g, or t
  misc_feature (1255)..(1256): n is a, c, g, or t
  misc_feature (1260)..(1260): n is a, c, g, or t
  misc_feature (1262)..(1264): n is a, c, g, or t
  misc_feature (1266)..(1266): n is a, c, g, or t
  misc_feature (1273)..(1273): n is a, c, g, or t
  misc_feature (1275)..(1276): n is a, c, g, or t
  misc_feature (1279)..(1279): n is a, c, g, or t
  misc_feature (1281)..(1283): n is a, c, g, or t
  misc_feature (1289)..(1289): n is a, c, g, or t
  misc_feature (1292)..(1297): n is a, c, g, or t
  misc_feature (1301)..(1301): n is a, c, g, or t
  misc_feature (1303)..(1303): n is a, c, g, or t
  misc_feature (1306)..(1306): n is a, c, g, or t
  misc_feature (1310)..(1310): n is a, c, g, or t
  misc_feature (1312)..(1316): n is a, c, g, or t
  misc_feature (1322)..(1323): n is a, c, g, or t
  misc_feature (1327)..(1327): n is a, c, g, or t
  misc_feature (1330)..(1330): n is a, c, g, or t
  misc_feature (1332)..(1332): n is a, c, g, or t
  misc_feature (1335)..(1335): n is a, c, g, or t
  misc_feature (1338)..(1338): n is a, c, g, or t
  misc_feature (1340)..(1345): n is a, c, g, or t
  misc_feature (1351)..(1356): n is a, c, g, or t
  misc_feature (1362)..(1363): n is a, c, g, or t
  misc_feature (1367)..(1368): n is a, c, g, or t
  misc_feature (1370)..(1375): n is a, c, g, or t
  misc_feature (1378)..(1378): n is a, c, g, or t
  misc_feature (1380)..(1380): n is a, c, g, or t
  misc_feature (1385)..(1386): n is a, c, g, or t
  misc_feature (1388)..(1389): n is a, c, g, or t
  misc_feature (1391)..(1392): n is a, c, g, or t
  misc_feature (1398)..(1402): n is a, c, g, or t
tagagaaattactatgagaggatcgcatcaccatcaccatcacggatcctatttaggtgacactatagaatcgtcgacccacgcgtccgaaatcggctgcgttcctctcggaacgcgccgcagaaggggtcctggtgacgagtcccgcgttctctccttgaatccactcgccagcccgccgccctctgccgccgcaccctgcacacccgcccctctcctgtgccaggaacttgctactaccagcaccatgccctaccaatatccagcactgaccccggagcagaagaaggagctgtctgacatcgctcaccgcatcgtggcacctggcaagggcatcctggctgcagatgagtccactgggagcattgccaagcggctgcagtccattggcaccgagaacaccgaggagaaccggcgcttctaccgccagctgctgctgacagctgacgaccgcgtgaacccctgcattgggggtgtcatcctcttccatgagacactctaccagaaggcggatgatgggcgtcccttcccccaagttatcaaatccaagggcggtgttgtgggcatcaaggtanacaagggcgtggtccccctggcagggacaaatggcgagactaccacccaagggttggatgggctgtctgagcgctgtgcccagtacaagaaggacggagctgacttcgccaagtggcgttgtgtgctgaagattggggaacacaccccctcagccctcgccatcatggaaaatgccaatgttctggcccgttatgccagtatctgccagcanaatggcattgtgcccatcgtggagcctganatcctccctgatggggaacatgactttgaancgctgccagtatgtgaccgaaaangtgctggctgctgttctacaaggcttctgagtgaccaccacatctancctggaaaggcaccttgctgaaacccaaaannggttcaccccangncatgnnttgnactnaaaaaatttttttcatgaagaaaatnggccattggnnaacngtnaaaangntgcncccnaaaaangncccccgnttntcanngggatnacctttcntgtntggaggncaaaaggaggagaaagnntccntnancctnanngccntaaaaanngccccctgttnaancctgggnccntaactttnnnttnanggnnaaccnggnngncttnnntnaagnnngggggggaaaaanaaaaattaannntnnnnnnnaatttntnnnanncctgnnaaanntttntnnnanaaaaaantnnaangnnngggggnttnnnnnnaatncnttntttnannnnnaaaagnngggnttnanggncanannnnnngccccnnnnnnaaaaanncctnngnnnnnngtncnttttnncnnanngggggnnnnnaaa

SEQ ID NO: 592 - DNA, 1362 bp, Homo Sapiens
  misc_feature (827)..(827): n is a, c, g, or t
  misc_feature (883)..(883): n is a, c, g, or t
  misc_feature (900)..(900): n is a, c, g, or t
  misc_feature (926)..(926): n is a, c, g, or t
  misc_feature (954)..(954): n is a, c, g, or t
  misc_feature (970)..(970): n is a, c, g, or t
  misc_feature (977)..(977): n is a, c, g, or t
  misc_feature (1000)..(1000): n is a, c, g, or t
  misc_feature (1014)..(1014): n is a, c, g, or t
  misc_feature (1020)..(1020): n is a, c, g, or t
  misc_feature (1038)..(1038): n is a, c, g, or t
  misc_feature (1059)..(1059): n is a, c, g, or t
  misc_feature (1073)..(1074): n is a, c, g, or t
  misc_feature (1077)..(1077): n is a, c, g, or t
  misc_feature (1088)..(1088): n is a, c, g, or t
  misc_feature (1090)..(1090): n is a, c, g, or t
  misc_feature (1094)..(1094): n is a, c, g, or t
  misc_feature (1107)..(1107): n is a, c, g, or t
  misc_feature (1110)..(1110): n is a, c, g, or t
  misc_feature (1121)..(1121): n is a, c, g, or t
  misc_feature (1127)..(1127): n is a, c, g, or t
  misc_feature (1133)..(1133): n is a, c, g, or t
  misc_feature (1137)..(1137): n is a, c, g, or t
  misc_feature (1147)..(1147): n is a, c, g, or t
  misc_feature (1154)..(1154): n is a, c, g, or t
  misc_feature (1157)..(1157): n is a, c, g, or t
  misc_feature (1159)..(1159): n is a, c, g, or t
  misc_feature (1180)..(1181): n is a, c, g, or t
  misc_feature (1183)..(1183): n is a, c, g, or t
  misc_feature (1205)..(1205): n is a, c, g, or t
  misc_feature (1211)..(1211): n is a, c, g, or t
  misc_feature (1215)..(1215): n is a, c, g, or t
  misc_feature (1227)..(1227): n is a, c, g, or t
  misc_feature (1234)..(1234): n is a, c, g, or t
  misc_feature (1240)..(1240): n is a, c, g, or t
  misc_feature (1276)..(1276): n is a, c, g, or t
  misc_feature (1279)..(1279): n is a, c, g, or t
  misc_feature (1286)..(1286): n is a, c, g, or t
  misc_feature (1295)..(1295): n is a, c, g, or t
  misc_feature (1297)..(1298): n is a, c, g, or t
  misc_feature (1300)..(1300): n is a, c, g, or t
  misc_feature (1303)..(1349): n is a, c, g, or t
  misc_feature (1358)..(1359): n is a, c, g, or t
agagaaattactatgagaggatcgcatcaccatcaccatcacggatcctatttaggtgacactatagaatcgtcgacccacgcgtccgcaccagtgcgcccgccggagggtgtttatcgcggctagagagatgtcgctgctgcggtcgctgcgcgtgtttctggtcgcgcggaccgggagctacccggctgggtctcttctgcgtcagtcgccccagccaaggcacacattttatgctgggccccgtctgtctgcctcggcctccagcaaggagctcctcatgaagctgcggcggaaaacaggctactcctttgtaaattgcaagaaagctctggagacttgtggcggggacctcaaacaggcagagatctggctccacaaggaggcccagaaggagggctggagcaaagctgccaagctccaagggaggaagaccaaagaaggcctgattgggctgttgcaggaaggaaacacaactgtattagtagaggtaaactgtgagacagattttgtttctagaaatttaaaatttcaactgttggtccagcaagtagcccttggaaccatgatgcattgtcagaccctaaaggatcaaccctctgcatacagtaaaggtttcttgaattcctctgagctttctggacttccagctgggcctgacagagaaggctcactcaaggatcagttggctttagcaattggaaaactgggagaaaacatgattcttaaacgagctgcatgggtgaaggtgccatctgggttctacgttggctcttatgtccacggagcaatgcagagtccctcacttcacaagctggtgctggggnaagtatgggggccctggtcatctgtgagacgtctgaacagaaaacaaaccttgaanacgttggccgccccccnttgggcaaccatgtggtgggcatggncccccctctctgttggctccctggaacnaatgaaccctgggggnaaaggcnaaaaaataaaaatgctgtcccanccgtattttgctgnatcccnccattaccttgggggcantatgtgcaaccctcagggggngtcggtaagaaaannttnggcggtttgantntggnaaaaggtgaaaangcnccaaaaacttnaaaagnttcccnaaanttttggcccnaagaagnaananttacttttaacccccgggacnncnttacaaaaagggaattttcccnaacccncttncaaccgaaaagncgggggnaaaatnttaaaaaaattgtaaaaaaaaaaaaattttttcttnttnggccccnaaaaaaaanannanaannnnnnnnnnnnnnnnnnnnnnnnnnnnnnnnnnnnnnnnnnnnnnnaaaaaaaannggc

SEQ ID NO: 593 - DNA, 1335 bp, Homo Sapiens
  misc_feature (785)..(785): n is a, c, g, or t
  misc_feature (798)..(798): n is a, c, g, or t
  misc_feature (802)..(802): n is a, c, g, or t
  misc_feature (822)..(822): n is a, c, g, or t
  misc_feature (825)..(825): n is a, c, g, or t
  misc_feature (854)..(854): n is a, c, g, or t
  misc_feature (862)..(862): n is a, c, g, or t
  misc_feature (864)..(864): n is a, c, g, or t
  misc_feature (869)..(869): n is a, c, g, or t
  misc_feature (879)..(879): n is a, c, g, or t
  misc_feature (891)..(892): n is a, c, g, or t
  misc_feature (894)..(894): n is a, c, g, or t
  misc_feature (897)..(897): n is a, c, g, or t
  misc_feature (904)..(904): n is a, c, g, or t
  misc_feature (908)..(908): n is a, c, g, or t
  misc_feature (912)..(912): n is a, c, g, or t
  misc_feature (924)..(924): n is a, c, g, or t
  misc_feature (928)..(928): n is a, c, g, or t
  misc_feature (950)..(950): n is a, c, g, or t
  misc_feature (962)..(962): n is a, c, g, or t
  misc_feature (971)..(971): n is a, c, g, or t
  misc_feature (973)..(973): n is a, c, g, or t
  misc_feature (977)..(978): n is a, c, g, or t
  misc_feature (985)..(988): n is a, c, g, or t
  misc_feature (990)..(990): n is a, c, g, or t
  misc_feature (993)..(993): n is a, c, g, or t
  misc_feature (995)..(995): n is a, c, g, or t
  misc_feature (999)..(999): n is a, c, g, or t
  misc_feature (1004)..(1004): n is a, c, g, or t
  misc_feature (1007)..(1007): n is a, c, g, or t
  misc_feature (1011)..(1011): n is a, c, g, or t
  misc_feature (1022)..(1022): n is a, c, g, or t
  misc_feature (1027)..(1027): n is a, c, g, or t
  misc_feature (1030)..(1030): n is a, c, g, or t
  misc_feature (1038)..(1038): n is a, c, g, or t
  misc_feature (1040)..(1040): n is a, c, g, or t
  misc_feature (1044)..(1044): n is a, c, g, or t
  misc_feature (1049)..(1050): n is a, c, g, or t
  misc_feature (1053)..(1058): n is a, c, g, or t
  misc_feature (1067)..(1067): n is a, c, g, or t
  misc_feature (1071)..(1071): n is a, c, g, or t
  misc_feature (1074)..(1074): n is a, c, g, or t
  misc_feature (1077)..(1077): n is a, c, g, or t
  misc_feature (1080)..(1080): n is a, c, g, or t
  misc_feature (1082)..(1082): n is a, c, g, or t
  misc_feature (1084)..(1084): n is a, c, g, or t
  misc_feature (1093)..(1093): n is a, c, g, or t
  misc_feature (1097)..(1099): n is a, c, g, or t
  misc_feature (1103)..(1103): n is a, c, g, or t
  misc_feature (1113)..(1113): n is a, c, g, or t
  misc_feature (1116)..(1116): n is a, c, g, or t
  misc_feature (1120)..(1120): n is a, c, g, or t
  misc_feature (1123)..(1123): n is a, c, g, or t
  misc_feature (1127)..(1127): n is a, c, g, or t
  misc_feature (1131)..(1131): n is a, c, g, or t
  misc_feature (1136)..(1138): n is a, c, g, or t
  misc_feature (1143)..(1143): n is a, c, g, or t
  misc_feature (1145)..(1148): n is a, c, g, or t
  misc_feature (1150)..(1150): n is a, c, g, or t
  misc_feature (1155)..(1155): n is a, c, g, or t
  misc_feature (1157)..(1164): n is a, c, g, or t
  misc_feature (1168)..(1169): n is a, c, g, or t
  misc_feature (1175)..(1175): n is a, c, g, or t
  misc_feature (1178)..(1185): n is a, c, g, or t
  misc_feature (1187)..(1187): n is a, c, g, or t
  misc_feature (1189)..(1189): n is a, c, g, or t
  misc_feature (1191)..(1191): n is a, c, g, or t
  misc_feature (1199)..(1200): n is a, c, g, or t
  misc_feature (1205)..(1206): n is a, c, g, or t
  misc_feature (1208)..(1208): n is a, c, g, or t
  misc_feature (1210)..(1212): n is a, c, g, or t
  misc_feature (1217)..(1219): n is a, c, g, or t
  misc_feature (1221)..(1223): n is a, c, g, or t
  misc_feature (1225)..(1230): n is a, c, g, or t
  misc_feature (1234)..(1240): n is a, c, g, or t
  misc_feature (1243)..(1244): n is a, c, g, or t
  misc_feature (1251)..(1251): n is a, c, g, or t
  misc_feature (1253)..(1253): n is a, c, g, or t
  misc_feature (1256)..(1256): n is a, c, g, or t
  misc_feature (1261)..(1265): n is a, c, g, or t
  misc_feature (1269)..(1271): n is a, c, g, or t
  misc_feature (1273)..(1280): n is a, c, g, or t
  misc_feature (1284)..(1285): n is a, c, g, or t
  misc_feature (1287)..(1335): n is a, c, g, or t
agaaaattaactatgagaggatcgcatcaccatcaccatcacggatcctatttaggtgacactatagaatcgtcgacccacgcgtccgctgggcgcctttccttgaggttctctgtccatgcctgttgctgcctccaggctccaagtgtgtgtgaggtgggactccacggctccgtgtggagtggctgtaggctgacctgcttatccagtgggctgtattcttttctgtgggatcttagacaactagcctcacctctcccagccttagtttcccagtctgcaaagctggaataaaaatagcatctagctcatgttgctgttggggccccaccctttcctagagtggagtagaacccgactgggcagtgttcacacctgggggcagggaggtttggggagtgctggaaggcatggtacccagtgaaggggtttctgggaagtccctttcagagagatgttagtttgtggatctgccatctcctgttacccccctgcccagggagcagaggccagggtccttcaggcgctgctgtaggcacagccccgccatcagcacagcgcctgggtcctccactggaccctaactagagagtgctgtcttgctcaaggttttgaaggcttgtggcctgttgcccaccctgcctcaggcacagagaggaagttgcctggggatcccagggtgagaagctaggttctctggcatgatgcccttctccacccagcctgtgctgcagaacagaacttacctgttttttttgtggtttttttttttttttgaaacggantcttgctctgtcnttangctggaatggtgcaatggcncgntctcggctcatgcaacctctgcctcccangtttcaancnattcncctgcctcgncctcctgggtanntnggnaatgcangaancccnccaccatgcccnaacnaaatttttgtattttttggggnaaaaaggtttcnccattgttngnccannaaagggnnnncnaancncttnaaccncanaaanccccccccccnttggnccncccaaaangntggnaaatnnaannnnnnaaccccccncccnggncanaangncnaaaaagccnaaannnaccntttttaaaanaantttnaancccntttnttttnnnaaaanannnncnttaangnnnnnnnnaaannttaaanggnnnnnnnncntntnccccaaannttttnntncnnnggggnnncnnncnnnnnntttnnnnnnnaannccccccngnganaaaannnnnaaannngnnnnnnnntttnncnnnnnnnnnnnnnnnnnnnnnnnnnnnnnnnnnnnnnnnnnnnnnnnnn

SEQ ID NO: 594 - DNA, 1352 bp, Homo Sapiens
  misc_feature (848)..(848): n is a, c, g, or t
  misc_feature (860)..(860): n is a, c, g, or t
  misc_feature (864)..(864): n is a, c, g, or t
  misc_feature (870)..(870): n is a, c, g, or t
  misc_feature (875)..(875): n is a, c, g, or t
  misc_feature (911)..(911): n is a, c, g, or t
  misc_feature (915)..(915): n is a, c, g, or t
  misc_feature (965)..(965): n is a, c, g, or t
  misc_feature (987)..(987): n is a, c, g, or t
  misc_feature (989)..(989): n is a, c, g, or t
  misc_feature (991)..(991): n is a, c, g, or t
  misc_feature (999)..(999): n is a, c, g, or t
  misc_feature (1032)..(1032): n is a, c, g, or t
  misc_feature (1047)..(1047): n is a, c, g, or t
  misc_feature (1049)..(1049): n is a, c, g, or t
  misc_feature (1055)..(1055): n is a, c, g, or t
  misc_feature (1057)..(1057): n is a, c, g, or t
  misc_feature (1059)..(1059): n is a, c, g, or t
  misc_feature (1064)..(1064): n is a, c, g, or t
  misc_feature (1071)..(1071): n is a, c, g, or t
  misc_feature (1088)..(1088): n is a, c, g, or t
  misc_feature (1099)..(1099): n is a, c, g, or t
  misc_feature (1109)..(1109): n is a, c, g, or t
  misc_feature (1112)..(1112): n is a, c, g, or t
  misc_feature (1127)..(1127): n is a, c, g, or t
  misc_feature (1130)..(1130): n is a, c, g, or t
  misc_feature (1140)..(1140): n is a, c, g, or t
  misc_feature (1171)..(1171): n is a, c, g, or t
  misc_feature (1174)..(1175): n is a, c, g, or t
  misc_feature (1178)..(1178): n is a, c, g, or t
  misc_feature (1181)..(1181): n is a, c, g, or t
  misc_feature (1185)..(1186): n is a, c, g, or t
  misc_feature (1191)..(1191): n is a, c, g, or t
  misc_feature (1201)..(1201): n is a, c, g, or t
  misc_feature (1210)..(1210): n is a, c, g, or t
  misc_feature (1212)..(1212): n is a, c, g, or t
  misc_feature (1214)..(1214): n is a, c, g, or t
  misc_feature (1217)..(1218): n is a, c, g, or t
  misc_feature (1226)..(1226): n is a, c, g, or t
  misc_feature (1233)..(1233): n is a, c, g, or t
  misc_feature (1235)..(1235): n is a, c, g, or t
  misc_feature (1238)..(1238): n is a, c, g, or t
  misc_feature (1243)..(1243): n is a, c, g, or t
  misc_feature (1245)..(1245): n is a, c, g, or t
  misc_feature (1251)..(1252): n is a, c, g, or t
  misc_feature (1260)..(1262): n is a, c, g, or t
  misc_feature (1270)..(1270): n is a, c, g, or t
  misc_feature (1279)..(1279): n is a, c, g, or t
  misc_feature (1285)..(1285): n is a, c, g, or t
  misc_feature (1290)..(1291): n is a, c, g, or t
  misc_feature (1295)..(1295): n is a, c, g, or t
  misc_feature (1299)..(1299): n is a, c, g, or t
  misc_feature (1305)..(1305): n is a, c, g, or t
  misc_feature (1307)..(1307): n is a, c, g, or t
  misc_feature (1309)..(1310): n is a, c, g, or t
  misc_feature (1315)..(1315): n is a, c, g, or t
  misc_feature (1326)..(1326): n is a, c, g, or t
  misc_feature (1328)..(1328): n is a, c, g, or t
  misc_feature (1331)..(1331): n is a, c, g, or t
  misc_feature (1338)..(1338): n is a, c, g, or t
  misc_feature (1341)..(1341): n is a, c, g, or t
  misc_feature (1348)..(1349): n is a, c, g, or t
  misc_feature (1352)..(1352): n is a, c, g, or t
tagagaaaattactatgagaggatcgcatcaccatcaccatcacggatcctatttaggtgacactatagaatcgtcgacccacgcgtccgggtccaggcgcccgcgcagaatcagctgtctgagctgcccaggcggcgggggagcagcgagcgggcttcagcgagccgcaggaggcacaggcctgtcctgggtccccgcaggtctgcgcgtctgttgttcccagcgctcttggaggcctgcaaaggaagagcaacctgtccagactccccgcaggacaggaaaaagagaaatctcgacatggaaaaaccctacaataaaaatgaaggaaacctggaaaacgagggaaagccagaagatgaagtagagcctgatgatgaaggaaagtcagacgaggaagaaaagccagacgcggaggggaagacagaatgcgagggaaagcgaaaggctgagggagagccaggtgatgagggacaactggaagataagggaagccaggaaaagcagggcaagtccgaaggtgagggcaagccacaaggcgagggcaagccagcctcccaggcaaagccagagggccagccgcgggccgccgaaaagcgcccggctggagattatgtgccccggaaagcaaaaagaaaaacagacagggggacggacgattcccccaaggactctcaggaggacttacaggaaaggcatctgagcagtgaggagatgatgagagaatgtggagatgtgtcaagggctcaggaggagctaaggaaaaaacagaaaatgggtggttttcattggatgcaaagagatgtacaggatccattcgccccaaggggacaacggggtgtcaggggantgaggggtggangtangggccnaaaangcttacacgatatcccatacctttatgcctttggcnttcnttctgacttctctgatgaaattattgtcaccctgctttccttggtaaatntttgccaggcccaatgctttancntnagctgatnttttgcttttaaatgtcaatctcgttccagcanctttttgacccactncngcgctntntnttttnttaaagnattttcccccctgtgcntggaaaaaatnttcttgaccnttntaaaaataataaatnaanaacgtttgcnaaaaaaaaaaaaaaaaaaaaaaaaagggggnccnnccnaangggnnccatnaacttttttnctgacttgncncnttnnaaaatccnaatgccncnaanccctngntttttnnaaccctgnnnccccgggnttttttttnggaaanccccnntttngggntttttngncnngggcntttggaaaaancnggntaccccnttntcccggnncan

SEQ ID NO: 595 - DNA, 1200 bp, Homo Sapiens
  misc_feature (3)..(3): n is a, c, g, or t
  misc_feature (704)..(704): n is a, c, g, or t
  misc_feature (768)..(768): n is a, c, g, or t
  misc_feature (777)..(777): n is a, c, g, or t
  misc_feature (788)..(788): n is a, c, g, or t
  misc_feature (798)..(798): n is a, c, g, or t
  misc_feature (800)..(800): n is a, c, g, or t
  misc_feature (806)..(806): n is a, c, g, or t
  misc_feature (819)..(819): n is a, c, g, or t
  misc_feature (840)..(840): n is a, c, g, or t
  misc_feature (850)..(850): n is a, c, g, or t
  misc_feature (872)..(872): n is a, c, g, or t
  misc_feature (874)..(874): n is a, c, g, or t
  misc_feature (885)..(885): n is a, c, g, or t
  misc_feature (888)..(888): n is a, c, g, or t
  misc_feature (895)..(895): n is a, c, g, or t
  misc_feature (902)..(902): n is a, c, g, or t
  misc_feature (938)..(938): n is a, c, g, or t
  misc_feature (961)..(961): n is a, c, g, or t
  misc_feature (980)..(980): n is a, c, g, or t
  misc_feature (994)..(994): n is a, c, g, or t
  misc_feature (997)..(997): n is a, c, g, or t
  misc_feature (1000)..(1000): n is a, c, g, or t
  misc_feature (1005)..(1005): n is a, c, g, or t
  misc_feature (1011)..(1012): n is a, c, g, or t
  misc_feature (1021)..(1021): n is a, c, g, or t
  misc_feature (1023)..(1023): n is a, c, g, or t
  misc_feature (1031)..(1031): n is a, c, g, or t
  misc_feature (1034)..(1034): n is a, c, g, or t
  misc_feature (1037)..(1037): n is a, c, g, or t
  misc_feature (1039)..(1039): n is a, c, g, or t
  misc_feature (1042)..(1042): n is a, c, g, or t
  misc_feature (1045)..(1046): n is a, c, g, or t
  misc_feature (1054)..(1054): n is a, c, g, or t
  misc_feature (1062)..(1063): n is a, c, g, or t
  misc_feature (1067)..(1068): n is a, c, g, or t
  misc_feature (1070)..(1070): n is a, c, g, or t
  misc_feature (1072)..(1073): n is a, c, g, or t
  misc_feature (1075)..(1076): n is a, c, g, or t
  misc_feature (1078)..(1116): n is a, c, g, or t
  misc_feature (1119)..(1119): n is a, c, g, or t
  misc_feature (1127)..(1128): n is a, c, g, or t
  misc_feature (1130)..(1130): n is a, c, g, or t
  misc_feature (1138)..(1139): n is a, c, g, or t
  misc_feature (1141)..(1141): n is a, c, g, or t
  misc_feature (1143)..(1143): n is a, c, g, or t
  misc_feature (1145)..(1146): n is a, c, g, or t
  misc_feature (1150)..(1150): n is a, c, g, or t
  misc_feature (1153)..(1153): n is a, c, g, or t
  misc_feature (1156)..(1156): n is a, c, g, or t
  misc_feature (1160)..(1160): n is a, c, g, or t
  misc_feature (1163)..(1164): n is a, c, g, or t
  misc_feature (1166)..(1166): n is a, c, g, or t
  misc_feature (1169)..(1169): n is a, c, g, or t
  misc_feature (1172)..(1172): n is a, c, g, or t
  misc_feature (1177)..(1177): n is a, c, g, or t
  misc_feature (1181)..(1181): n is a, c, g, or t
  misc_feature (1183)..(1183): n is a, c, g, or t
  misc_feature (1185)..(1185): n is a, c, g, or t
  misc_feature (1194)..(1198): n is a, c, g, or t
  misc_feature (1200)..(1200): n is a, c, g, or t
aantagagaaattactatgagaggatcgcatcaccatcaccatcacggatcctatttaggtgacactatagaatcgtcgacccacgcgtccggacatctgcttccgcaccctgaagctgaccacccccacctacggggacctcaaccacctggtgtcggccaccatgagcggggtcaccacctgcctgcgcttcccgggccagctgaacgcagacctgcgcaagctggcggtgaacatggtgcccttccctcgcctgcacttcttcatgcccggcttcgcgcccctgaccagccggggcagccagcagtaccgggcgctcacggtgcccgagctcacccagcagatgttcgactccaagaacatgatggccgcctgcgacccgcgccacggccgctacctgacggtggctgccatcttccggggccgcatgtccatgaaggaggtggacgagcagatgctcaacgtgcagaacaagaacagcagctacttcgtggagtggatccccaacaacgtgaagacggccgtgtgcgacatcccgccccgcggcctgaagatgtcggccaccttcatcggcaacagcacggccatccaggagctgttcaagcgcatctccgagcagttcacggccatgttccggcgcaaggccttcctgcactggtacacgggcgagggcatggacgagatggagttcaccgaggccganagcaacatgaacgacctggtgtccgagtaccagcagtaccaggacgccacggccgacgaacaangggagttcnaggaggagganggcgaggacnangcgtanatgcccccgcganacgggttaagggaaagcggangaggaaagcnagggggtggggggcttcccggnangataacctggncantggaagnaaaaaancatggtctactttaggtgtgcgcttgggtctctggngctcttcacttgttgcctgtcanttttttttcctttttttgnaaaattgatgaaantcnaangtaanaatttnnaaaattttntngaaattantgnttngnaanggnntaaaatcnaataaaanntttnntntnngnnannnnnnnnnnnnnnnnnnnnnnnnnnnnnnnnnnnnnnnaanggggggcnncnccctaaanngnantnnaatnaanttnaatntanntnaanttngaatncctngntnaaaaaatcnnnnnan

SEQ ID NO: 596 - DNA, 980 bp, Homo Sapiens
  misc_feature (1)..(1): n is a, c, g, or t
  misc_feature (888)..(888): n is a, c, g, or t
  misc_feature (916)..(916): n is a, c, g, or t
  misc_feature (921)..(931): n is a, c, g, or t
  misc_feature (933)..(980): n is a, c, g, or t
naaatagagaaattactatgagaggatcgcatcaccatcaccatcacggatcctatttaggtgacactatagaatcgtcgacccacgcgtccggcgcacagggcgagggcggctgcggcgcagtctgcagcatggcgtacccggggcatcctggcgccggcggcgggtactacccaggcgggtatggaggggctcccggagggcctgcgtttcccggacaaactcaggatccgctgtatggttactttgctgctgtagctggacaggatgggcagatagatgctgatgaattgcagagatgtctgacacagtctggcattgctggaggatacaaaccttttaacctggagacttgccggcttatggtttcaatgctggatagagatatgtctggcacaatgggtttcaatgaatttaaagaactctgggctgtactgaatggctggagacaacactttatcagttttgacactgacaggagtggaacagtagacccacaagaattgcagaaggccctgacaacaatgggatttaggttgagtccccaggctgtgaattcaattgcaaaacgatacagcaccaatggaaagatcaccttcgacgactacatcgcctgctgcgtcaaactgagggctcttacagacagctttcgaagacgggatactgctcagcaaggtgttgtgaatttcccatatgatgatttcattcaatgtgtcatgagtgtttaaatcaagaggaagctgcatgaatgtaatcaacattccaactggagctctcctttgcttgtcctctttgccttcggtaatatgtataaacttacatcacgactttctcttaacagctgttgtaaagtttattactttatgtacaactgaagttttgttttanttttgataataaattctttggaactttnaaaannnnnnnnnnnannnnnnnnnnnnnnnnnnnnnnnnnnnnnnnnnnnnnnnnnnnnnnnn

SEQ ID NO: 597 - DNA, 1187 bp, Homo Sapiens
  misc_feature (862)..(862): n is a, c, g, or t
  misc_feature (879)..(879): n is a, c, g, or t
  misc_feature (906)..(906): n is a, c, g, or t
  misc_feature (910)..(910): n is a, c, g, or t
  misc_feature (918)..(918): n is a, c, g, or t
  misc_feature (956)..(956): n is a, c, g, or t
  misc_feature (960)..(960): n is a, c, g, or t
  misc_feature (979)..(979): n is a, c, g, or t
  misc_feature (982)..(982): n is a, c, g, or t
  misc_feature (987)..(987): n is a, c, g, or t
  misc_feature (997)..(997): n is a, c, g, or t
  misc_feature (999)..(999): n is a, c, g, or t
  misc_feature (1001)..(1001): n is a, c, g, or t
  misc_feature (1011)..(1011): n is a, c, g, or t
  misc_feature (1021)..(1022): n is a, c, g, or t
  misc_feature (1026)..(1026): n is a, c, g, or t
  misc_feature (1038)..(1038): n is a, c, g, or t
  misc_feature (1046)..(1047): n is a, c, g, or t
  misc_feature (1053)..(1053): n is a, c, g, or t
  misc_feature (1065)..(1065): n is a, c, g, or t
  misc_feature (1068)..(1069): n is a, c, g, or t
  misc_feature (1072)..(1072): n is a, c, g, or t
  misc_feature (1074)..(1074): n is a, c, g, or t
  misc_feature (1078)..(1078): n is a, c, g, or t
  misc_feature (1080)..(1080): n is a, c, g, or t
  misc_feature (1088)..(1088): n is a, c, g, or t
  misc_feature (1091)..(1092): n is a, c, g, or t
  misc_feature (1100)..(1100): n is a, c, g, or t
  misc_feature (1104)..(1104): n is a, c, g, or t
  misc_feature (1114)..(1115): n is a, c, g, or t
  misc_feature (1117)..(1117): n is a, c, g, or t
  misc_feature (1119)..(1119): n is a, c, g, or t
  misc_feature (1123)..(1123): n is a, c, g, or t
  misc_feature (1125)..(1126): n is a, c, g, or t
  misc_feature (1133)..(1135): n is a, c, g, or t
  misc_feature (1137)..(1140): n is a, c, g, or t
  misc_feature (1142)..(1187): n is a, c, g, or t
aatagagaaattactatgagaggatcgcatcaccattcaccatcacggatcctatttaggtgacactatagaatcgtcgacccacgcgtccgcggacgcgtgggctcccgcagccgcagccgccgtgctcagcgcgagccccggagcccttgagcgcgaggcgcggagcccccggagcccccaaaccgcagacacatccccgcgccccagagccccggcctgcgcgcccagccgggcccgcgcgatgccctcagaccggcctttcaagcagcggcggagcttcggtgaggcccggcaggcgagctgcgagctctggggcaggggtgccggccgaccccgactgccgcagccgaccgctgtaaggaggtacagcagatccgcgaccagcaccccagcaaaatcccggtgatcatcgagcgctacaagggtgagaagcagctgcccgtcctggacaagaccaagtttttggtcccggaccatgtcaacatgagcgagttggtcaagatcatccggcgccgcctgcagctgaaccccacgcaggccttcttcctgctggtgaaccagcacagcatggtgagtgtgtccacgcccatcgcggacatctacgagcaggagaaagacgaggacggcttcctctatatggtctacgcctcccaggaaaccttcggcttctgagccagcagtaggggggctcggcctgggagtcggggggccccggtcaggccctgcccagagagctcctggttcctgaactgagctgcctctaccgtggtgggctgggcaggcatgtgccccccctagtcagaaggcaccaacccacctactctgcccctggggtggatcctgggccggttcgtgttanggtttgtccctctgggntgctggctggtgggaatgggggaaggntggnaacaactncccaacaccccttgctgtgtggttcaatcttttttttnaagnccctgcctgtttgcccatntgnccctnaaccaccaangntntgcccaccgncctggaactnnccanccctgaaaaaangcccttgnnttcccnccccttggtttncannggngnatgnanttggtgtnttnnccctctgnaaanaaaaattgtnnangncttncnnaaaaaannnannnnannnnnnnnnnnnnnnnnnnnnnnnnnnnnnnnnnnnnnnnnnnnnn

SEQ ID NO: 598 - DNA, 1200 bp, Homo Sapiens
  misc_feature (1)..(1): n is a, c, g, or t
  misc_feature (827)..(827): n is a, c, g, or t
  misc_feature (835)..(835): n is a, c, g, or t
  misc_feature (840)..(841): n is a, c, g, or t
  misc_feature (843)..(881): n is a, c, g, or t
  misc_feature (884)..(884): n is a, c, g, or t
  misc_feature (892)..(892): n is a, c, g, or t
  misc_feature (898)..(898): n is a, c, g, or t
  misc_feature (901)..(901): n is a, c, g, or t
  misc_feature (921)..(921): n is a, c, g, or t
  misc_feature (923)..(923): n is a, c, g, or t
  misc_feature (925)..(925): n is a, c, g, or t
  misc_feature (938)..(938): n is a, c, g, or t
  misc_feature (940)..(940): n is a, c, g, or t
  misc_feature (954)..(954): n is a, c, g, or t
  misc_feature (964)..(964): n is a, c, g, or t
  misc_feature (966)..(966): n is a, c, g, or t
  misc_feature (969)..(969): n is a, c, g, or t
  misc_feature (971)..(971): n is a, c, g, or t
  misc_feature (988)..(988): n is a, c, g, or t
  misc_feature (993)..(993): n is a, c, g, or t
  misc_feature (999)..(999): n is a, c, g, or t
  misc_feature (1011)..(1011): n is a, c, g, or t
  misc_feature (1019)..(1019): n is a, c, g, or t
  misc_feature (1023)..(1023): n is a, c, g, or t
  misc_feature (1032)..(1032): n is a, c, g, or t
  misc_feature (1034)..(1034): n is a, c, g, or t
  misc_feature (1053)..(1053): n is a, c, g, or t
  misc_feature (1059)..(1059): n is a, c, g, or t
  misc_feature (1063)..(1063): n is a, c, g, or t
  misc_feature (1065)..(1065): n is a, c, g, or t
  misc_feature (1069)..(1069): n is a, c, g, or t
  misc_feature (1089)..(1089): n is a, c, g, or t
  misc_feature (1091)..(1091): n is a, c, g, or t
  misc_feature (1095)..(1095): n is a, c, g, or t
  misc_feature (1100)..(1100): n is a, c, g, or t
  misc_feature (1102)..(1102): n is a, c, g, or t
  misc_feature (1113)..(1113): n is a, c, g, or t
  misc_feature (1115)..(1115): n is a, c, g, or t
  misc_feature (1120)..(1122): n is a, c, g, or t
  misc_feature (1129)..(1130): n is a, c, g, or t
  misc_feature (1139)..(1139): n is a, c, g, or t
  misc_feature (1144)..(1144): n is a, c, g, or t
  misc_feature (1148)..(1148): n is a, c, g, or t
  misc_feature (1157)..(1157): n is a, c, g, or t
  misc_feature (1160)..(1160): n is a, c, g, or t
  misc_feature (1163)..(1163): n is a, c, g, or t
  misc_feature (1168)..(1168): n is a, c, g, or t
  misc_feature (1174)..(1174): n is a, c, g, or t
  misc_feature (1180)..(1180): n is a, c, g, or t
  misc_feature (1182)..(1182): n is a, c, g, or t
  misc_feature (1189)..(1189): n is a, c, g, or t
nagagaaattactatgagaggatcgcatcaccatcaccatcacggatcctatttaggtgacactatagaatcgtcgacccacgcgtccgcccacgcgtccgcccacgcgtccgagcgcctgagaaagaagtttgcccaaaagatgcttcgaaaggcaaggaggaagcttatctatgaaaaagcaaagcactatcacaaggaatataggcagatgtacagaactgaaattcgaatggcgaggatggcaagaaaagctggcaacttctatgtacctgcagaacccaaattggcgtttgtcatcagaatcagaggtatcaatggagtgagcccaaaggttcgaaaggtgttgcagcttcttcgccttcgtcaaatcttcaatggaacctttgtgaagctcaacaaggcttcgattaacatgctgaggattgtagagccatatattgcatgggggtaccccaatctgaagtcagtaaatgaactaatctacaagcgtggttatggcaaaatcaataagaagcgaattgctttgacagataacgctttgattgctcgatctcttggtaaatacggcatcatctgcatggaggatttgattcatgagatctatactgttggaaaacgcttcaaagaggcaaataacttcctgtggcccttcaaattgtcttctccacgaggtggaatgaagaaaaagaccacccattttgtagaaggtggagatgctggcaacagggaggaccagatcaacaggcttattagaagaatgaactaaggtgtctaccatgattatttttctaagctggttggttaataaacagtacctgctctcnaatttganaaaannannnnnnnnnnnnnnnnnnnnnnnnnnnnnnnnnnnnnnnggncggccgcnccctanagnggagtcgtattaagctttantnanctgaactgggacncntgttgataaatccngtaatgaccncnaancnccctctggattttttcnaaacncccggntgccccccgggngttttttntggngaaaatccnanctaactttggcgaaatttnccgganctangnaacntaaatggaaaaaaatccccngnaatnccccngntgaaattcccnanggctnnnaaaaaannttttggggntttcncccnttgccccanggnccntaaancaaacngttccncnggaattncggcccttttt

SEQ ID NO: 599 - DNA, 1200 bp, Homo Sapiens
  misc_feature (2)..(2): n is a, c, g, or t
  misc_feature (717)..(717): n is a, c, g, or t
  misc_feature (733)..(733): n is a, c, g, or t
  misc_feature (767)..(767): n is a, c, g, or t
  misc_feature (858)..(858): n is a, c, g, or t
  misc_feature (877)..(877): n is a, c, g, or t
  misc_feature (905)..(905): n is a, c, g, or t
  misc_feature (910)..(910): n is a, c, g, or t
  misc_feature (919)..(919): n is a, c, g, or t
  misc_feature (930)..(930): n is a, c, g, or t
  misc_feature (933)..(933): n is a, c, g, or t
  misc_feature (938)..(938): n is a, c, g, or t
  misc_feature (940)..(940): n is a, c, g, or t
  misc_feature (942)..(942): n is a, c, g, or t
  misc_feature (950)..(951): n is a, c, g, or t
  misc_feature (956)..(956): n is a, c, g, or t
  misc_feature (959)..(959): n is a, c, g, or t
  misc_feature (964)..(965): n is a, c, g, or t
  misc_feature (967)..(967): n is a, c, g, or t
  misc_feature (974)..(974): n is a, c, g, or t
  misc_feature (979)..(979): n is a, c, g, or t
  misc_feature (985)..(985): n is a, c, g, or t
  misc_feature (988)..(989): n is a, c, g, or t
  misc_feature (993)..(993): n is a, c, g, or t
  misc_feature (999)..(999): n is a, c, g, or t
  misc_feature (1001)..(1001): n is a, c, g, or t
  misc_feature (1010)..(1010): n is a, c, g, or t
  misc_feature (1024)..(1025): n is a, c, g, or t
  misc_feature (1027)..(1027): n is a, c, g, or t
  misc_feature (1032)..(1032): n is a, c, g, or t
  misc_feature (1040)..(1040): n is a, c, g, or t
  misc_feature (1045)..(1046): n is a, c, g, or t
  misc_feature (1050)..(1050): n is a, c, g, or t
  misc_feature (1062)..(1062): n is a, c, g, or t
  misc_feature (1071)..(1072): n is a, c, g, or t
  misc_feature (1075)..(1075): n is a, c, g, or t
  misc_feature (1077)..(1077): n is a, c, g, or t
  misc_feature (1083)..(1083): n is a, c, g, or t
  misc_feature (1090)..(1090): n is a, c, g, or t
  misc_feature (1095)..(1096): n is a, c, g, or t
  misc_feature (1108)..(1110): n is a, c, g, or t
  misc_feature (1112)..(1112): n is a, c, g, or t
  misc_feature (1114)..(1115): n is a, c, g, or t
  misc_feature (1117)..(1117): n is a, c, g, or t
  misc_feature (1120)..(1120): n is a, c, g, or t
  misc_feature (1123)..(1123): n is a, c, g, or t
  misc_feature (1128)..(1130): n is a, c, g, or t
  misc_feature (1132)..(1132): n is a, c, g, or t
  misc_feature (1135)..(1135): n is a, c, g, or t
  misc_feature (1141)..(1142): n is a, c, g, or t
  misc_feature (1145)..(1146): n is a, c, g, or t
  misc_feature (1150)..(1150): n is a, c, g, or t
  misc_feature (1156)..(1156): n is a, c, g, or t
  misc_feature (1167)..(1167): n is a, c, g, or t
  misc_feature (1171)..(1171): n is a, c, g, or t
  misc_feature (1173)..(1175): n is a, c, g, or t
  misc_feature (1179)..(1179): n is a, c, g, or t
  misc_feature (1181)..(1182): n is a, c, g, or t
  misc_feature (1184)..(1186): n is a, c, g, or t
  misc_feature (1188)..(1188): n is a, c, g, or t
  misc_feature (1190)..(1190): n is a, c, g, or t
  misc_feature (1193)..(1195): n is a, c, g, or t
anaatagagaaattactatgagaggatcgcatcaccatcaccatcacggatcctatttaggtgacactatagaatcgtcgacccacgcgtccggtctgtccagccctgggaagcgaccttggcctcagttcacagcctggtgctcatctgctggcaccgggcatccacccatcagcccccgccctgtccctccgaaggacacccagcaggcaccccccggggaggcaggggcagaggtcagaaggggtgtctgggacctggatggccagcagggacaggggcattgtcatctcaaaggcccaacccccagaggccacaccagtcctcccagggagtcctcgagtcgccctgcccagagccctggcaccagagacgccaagagcctgtggggtgactcggagcagcaggtgtggccccgggcgggcggcaccgcgtccagggcagcctccctccgctgagtgacacgggacaccagtgcccggccgacgcgcctttgcaggagaaatgtgcaaacctctgtggataccatttcatttccattcttgtgttgtctccaaggcccttttggagatatacttggtgttggttgtgtttttttggttccttttcagagaactgtaaaccgaggctgacgtgctccactgactgtgccgaggggcgggggcaggaggacggcaagacctatttataatatttagcgaactcggtctccctcanatcccccgcgagggangctgctggacccaccccgctgtcccccatgatanaagtctgtaaataccttggtgaccaatgcccacttcccctcctgggtcacctctgatggctgctgtccactgaaaacgtgggcagtgtccnaaattcctgtactgtaaanactaaaaggcgtttgctctgaaactganaaggnggaaacttncatgtgtctcntgncaggntntntcccctannccatnccnaaaanntncccgttnccccnaaaacntgnntcantggaanantcccattgncatggggtcctttnncnatggnaatgtttncaaanncctnaattcccacccnagaaaaggnnccngncaactncctcttnatttnnggggggttaatnnntncnncngtnccnaaccnnntnccntttttnnggnnaaanttattntaaaaaaaaanaaantnnnaacntnngnnntntnaannnccccc

SEQ ID NO: 600 - DNA, 1200 bp, Homo Sapiens
  misc_feature (807)..(807): n is a, c, g, or t
  misc_feature (828)..(828): n is a, c, g, or t
  misc_feature (864)..(864): n is a, c, g, or t
  misc_feature (873)..(873): n is a, c, g, or t
  misc_feature (912)..(912): n is a, c, g, or t
  misc_feature (980)..(980): n is a, c, g, or t
  misc_feature (990)..(990): n is a, c, g, or t
  misc_feature (999)..(999): n is a, c, g, or t
  misc_feature (1005)..(1005): n is a, c, g, or t
  misc_feature (1050)..(1050): n is a, c, g, or t
  misc_feature (1055)..(1055): n is a, c, g, or t
  misc_feature (1060)..(1060): n is a, c, g, or t
  misc_feature (1065)..(1067): n is a, c, g, or t
  misc_feature (1069)..(1069): n is a, c, g, or t
  misc_feature (1073)..(1073): n is a, c, g, or t
  misc_feature (1089)..(1089): n is a, c, g, or t
  misc_feature (1096)..(1096): n is a, c, g, or t
  misc_feature (1099)..(1101): n is a, c, g, or t
  misc_feature (1105)..(1105): n is a, c, g, or t
  misc_feature (1108)..(1108): n is a, c, g, or t
  misc_feature (1112)..(1113): n is a, c, g, or t
  misc_feature (1117)..(1117): n is a, c, g, or t
  misc_feature (1120)..(1120): n is a, c, g, or t
  misc_feature (1134)..(1181): n is a, c, g, or t
  misc_feature (1184)..(1184): n is a, c, g, or t
  misc_feature (1192)..(1193): n is a, c, g, or t
  misc_feature (1195)..(1195): n is a, c, g, or t
  misc_feature (1198)..(1199): n is a, c, g, or t
aatagagaaattactatgagaggatcgcatcaccatcaccatcacggatcctatttaggtgacactatagaatcgtcgacccacgcgtccgatgagacactctaccagaaggcggatgatgggcgtcccttcccccaagttatcaaatccaagggcggtgttgtgggcatcaaggtagacaagggcgtggtccccctggcagggacaaatggcgagactaccacccaagggttggatgggctgtctgagcgctgtgcccagtacaagaaggacggagctgacttcgccaagtggcgttgtgtgctgaagattggggaacacaccccctcagccctcgccatcatggaaaatgccaatgttctggcccgttatgccagtatctgccagcagaatggcattgtgcccatcgtggagcctgagatcctccctgatggggaccatgacttgaagcgctgccagtatgtgaccgagaaggtgctggctgctgtctacaaggctctgagtgaccaccacatctacctggaaggcaccttgctgaagcccaacatggtcaccccaggccatgcttgcactcagaagttttctcatgaggagattgccatggcgaccgtcacagcgctgcgccgcacagtgccccccgctgtcactgggatcaccttcctgtctggaggccagagtgaggaggaggcgtccatcaacctcaatgccattaacaagtgccccctgctgaagccctgggccctgaccttctcctacggccgagccctgcaggcctctgccctgaaggcctggggcgggaagaagganaacctgaaggctgcgcaggangagtatgtcaagcgagccctggccaacagccttgcntgtcaaggnaaagtacactccgagcggtcaggctggggctgctgccancgagtcctcttcgtctctaaccacgcctattaagcggaggtgttccaggctgccccaaaactccaggncctgcccctnccattcttnaaagangcccctcctcgggctccagctggttgcccccctctttttccctcngaaanggtgnggggnnncnctgnaaatgctaatccatcncctttcnggnnntgcnaanaaanncttnttnagggggaaaaaaannnnnnnnnnnnnnnnnnnnnnnnnnnnnnnnnnnnnnnnnnnnnnnnggngccccccnnanggnnc

SEQ ID NO: 601 - DNA, 1200 bp, Homo Sapiens
  misc_feature (862)..(862): n is a, c, g, or t
  misc_feature (883)..(883): n is a, c, g, or t
  misc_feature (896)..(896): n is a, c, g, or t
  misc_feature (903)..(903): n is a, c, g, or t
  misc_feature (933)..(933): n is a, c, g, or t
  misc_feature (945)..(945): n is a, c, g, or t
  misc_feature (977)..(977): n is a, c, g, or t
  misc_feature (980)..(980): n is a, c, g, or t
  misc_feature (995)..(995): n is a, c, g, or t
  misc_feature (1000)..(1000): n is a, c, g, or t
  misc_feature (1002)..(1002): n is a, c, g, or t
  misc_feature (1010)..(1010): n is a, c, g, or t
  misc_feature (1013)..(1013): n is a, c, g, or t
  misc_feature (1015)..(1015): n is a, c, g, or t
  misc_feature (1030)..(1030): n is a, c, g, or t
  misc_feature (1037)..(1037): n is a, c, g, or t
  misc_feature (1040)..(1040): n is a, c, g, or t
  misc_feature (1044)..(1044): n is a, c, g, or t
  misc_feature (1054)..(1054): n is a, c, g, or t
  misc_feature (1056)..(1056): n is a, c, g, or t
  misc_feature (1058)..(1059): n is a, c, g, or t
  misc_feature (1063)..(1063): n is a, c, g, or t
  misc_feature (1072)..(1072): n is a, c, g, or t
  misc_feature (1078)..(1078): n is a, c, g, or t
  misc_feature (1083)..(1083): n is a, c, g, or t
  misc_feature (1089)..(1089): n is a, c, g, or t
  misc_feature (1101)..(1101): n is a, c, g, or t
  misc_feature (1118)..(1118): n is a, c, g, or t
  misc_feature (1120)..(1120): n is a, c, g, or t
  misc_feature (1126)..(1126): n is a, c, g, or t
  misc_feature (1129)..(1129): n is a, c, g, or t
  misc_feature (1132)..(1132): n is a, c, g, or t
  misc_feature (1140)..(1140): n is a, c, g, or t
  misc_feature (1144)..(1144): n is a, c, g, or t
  misc_feature (1155)..(1155): n is a, c, g, or t
  misc_feature (1157)..(1157): n is a, c, g, or t
  misc_feature (1161)..(1162): n is a, c, g, or t
  misc_feature (1179)..(1179): n is a, c, g, or t
  misc_feature (1181)..(1181): n is a, c, g, or t
  misc_feature (1183)..(1184): n is a, c, g, or t
  misc_feature (1189)..(1191): n is a, c, g, or t
aatagagaaattactatgagaggatcgcatcaccatcaccatcacggatcctatttaggtgacactatagaatcgtcgacccacgcgtccgcccacgcgtccggtagttttctctgcgcgtgtgcgttttccctcctcccccgccctcagggtccacggccaccatggcgtattaggggcagcagtgcctgcggcagcattggcctttgcagcggcggcagcagcaccaggctctgcagcggcaacccccagcggcttaagccatggcgcttctcacggcattcagcagcagcgttgctgtaaccgacaaagacaccttcgaattaagcacattcctcgattccagcaaagcaccgcaacatgaccgaaatgagcttcctgagcagcgaggtgttggtgggggacttgatgtcccccttcgacccgtcgggtttgggggctgaagaaagcctaggtctcttagatgattacctggaggtggccaagcacttcaaacctcatgggttctccagcgacaaggctaaggcgggctcctccgaatggctggctgtggatgggttggtcagtccctccaacaacagcaaggaggatgccttctccgggacagattggatgttggagaaaatggatttgaaggagttcgacttggatgccctgttgggtatagatgacctggaaaccatgccagatgaccttctgaccacgttggatgacacttgtgatctctttgcccccctagtccaggagactaataagcagcccccccagacggtgaacccaattggccatctcccagaaagtttaacaaaacccgaccaggttgcccccttcaccttcttacaacctcttcccctttccccangggtcctgtcctccactccanatcattcctttantttaaanctgggcatgaagtggatatcactgaagganataggaagccanactacactgcttacgttgccatgatccctcantgnataaagaaggaaaanacccntncaaaaaangananggcatctgtatgaancccaaantcntatntgggggctcntnannaaancccctttanaagggntctcnaaaaanaaccccccatcnccaggggtttctggggntngcccgnccnaancttaaatnctcntggaaaaaaangnaacnncaaaataaggggaaaantngnnaaaannnaaaaaatgg

SEQ ID NO: 602 - DNA, 1172 bp, Homo Sapiens
  misc_feature (724)..(724): n is a, c, g, or t
  misc_feature (750)..(750): n is a, c, g, or t
  misc_feature (755)..(755): n is a, c, g, or t
  misc_feature (780)..(780): n is a, c, g, or t
  misc_feature (783)..(783): n is a, c, g, or t
  misc_feature (840)..(840): n is a, c, g, or t
  misc_feature (873)..(873): n is a, c, g, or t
  misc_feature (890)..(890): n is a, c, g, or t
  misc_feature (893)..(893): n is a, c, g, or t
  misc_feature (900)..(900): n is a, c, g, or t
  misc_feature (905)..(905): n is a, c, g, or t
  misc_feature (910)..(910): n is a, c, g, or t
  misc_feature (920)..(920): n is a, c, g, or t
  misc_feature (927)..(927): n is a, c, g, or t
  misc_feature (934)..(934): n is a, c, g, or t
  misc_feature (936)..(936): n is a, c, g, or t
  misc_feature (942)..(942): n is a, c, g, or t
  misc_feature (948)..(948): n is a, c, g, or t
  misc_feature (950)..(951): n is a, c, g, or t
  misc_feature (955)..(955): n is a, c, g, or t
  misc_feature (957)..(957): n is a, c, g, or t
  misc_feature (961)..(961): n is a, c, g, or t
  misc_feature (971)..(971): n is a, c, g, or t
  misc_feature (977)..(977): n is a, c, g, or t
  misc_feature (979)..(979): n is a, c, g, or t
  misc_feature (981)..(981): n is a, c, g, or t
  misc_feature (984)..(984): n is a, c, g, or t
  misc_feature (986)..(986): n is a, c, g, or t
  misc_feature (988)..(988): n is a, c, g, or t
  misc_feature (991)..(992): n is a, c, g, or t
  misc_feature (995)..(995): n is a, c, g, or t
  misc_feature (999)..(1000): n is a, c, g, or t
  misc_feature (1003)..(1004): n is a, c, g, or t
  misc_feature (1010)..(1010): n is a, c, g, or t
  misc_feature (1015)..(1017): n is a, c, g, or t
  misc_feature (1021)..(1021): n is a, c, g, or t
  misc_feature (1023)..(1023): n is a, c, g, or t
  misc_feature (1025)..(1026): n is a, c, g, or t
  misc_feature (1029)..(1029): n is a, c, g, or t
  misc_feature (1034)..(1035): n is a, c, g, or t
  misc_feature (1038)..(1038): n is a, c, g, or t
  misc_feature (1040)..(1042): n is a, c, g, or t
  misc_feature (1046)..(1046): n is a, c, g, or t
  misc_feature (1050)..(1055): n is a, c, g, or t
  misc_feature (1058)..(1058): n is a, c, g, or t
  misc_feature (1064)..(1068): n is a, c, g, or t
  misc_feature (1070)..(1073): n is a, c, g, or t
  misc_feature (1075)..(1075): n is a, c, g, or t
  misc_feature (1077)..(1085): n is a, c, g, or t
  misc_feature (1087)..(1087): n is a, c, g, or t
  misc_feature (1093)..(1093): n is a, c, g, or t
  misc_feature (1095)..(1095): n is a, c, g, or t
  misc_feature (1097)..(1098): n is a, c, g, or t
  misc_feature (1102)..(1103): n is a, c, g, or t
  misc_feature (1106)..(1108): n is a, c, g, or t
  misc_feature (1110)..(1110): n is a, c, g, or t
  misc_feature (1113)..(1118): n is a, c, g, or t
  misc_feature (1120)..(1120): n is a, c, g, or t
  misc_feature (1122)..(1129): n is a, c, g, or t
  misc_feature (1132)..(1141): n is a, c, g, or t
  misc_feature (1143)..(1146): n is a, c, g, or t
  misc_feature (1149)..(1149): n is a, c, g, or t
  misc_feature (1152)..(1154): n is a, c, g, or t
  misc_feature (1156)..(1172): n is a, c, g, or t
tagagaaaattactatgagaggatcgcatcaccatcaccatcacggatcctatttaggtgacactatagaatcgtcgacccacgcgtccggcaagatgaatgcaggctcagatcctgtggtcatcgtctcggcggcgcggaccatcataggttccttcaatggtgccttagctgctgttcctgtccaggacctgggctccactgtcatcaaagaagtcttgaagagggccactgtggctccggaagatgtgtctgaggtcatctttggacatgtcttggcagcaggctgtgggcagaatcctgttagacaagccagtgtgggtgcaggaattccctactctgttccagcatggagctgccagatgatctgtgggtcaggcctaaaagctgtgtgccttgcagtccagtcaatagggataggagactccagcattgtggttgcaggaggcatggaaaatatgagcaaggctcctcacttggcttacttgagaacaggagtaaagataggtgagatgccactgactgacagtatactctgtgatggtcttacagatgcatttcacaactgtcatatgggtattacagctgaaaatgtagccaaaaaatggcaagtgagtagagaagatcaggacaaggttgcagttctgtcccagaacaggacagagaatgcacagaaagctggccattttgacaaagagattgtaccagttttggtgtcaactanaaaaggtcttattgaagttaaaacanatgantttcctcgccatgggagcaacatanaanccatgtccaagctaaagccttactttcttactgatggaacgggaacagtcaccccanccaatgcttcaggaataaatgatggtgctgcanctgttgttcttatgaanaantcaaaanctganaaacntgggcttacncctttancacgganantttccnggtccnanngggngngganccttccttangggaanangnacnantnccnnccnaaannaanntgttanaaaannngttngncnntgnaaaannttnannntttnaaannnnnnaancctttnnnnntnnnncngnnnnnnnnntnaaaaantngnnttannccnnnanaannnnnnantnnnnnnnnggnnnnnnnnnntnnnnccnccnnntnnnnnnnnnnnnnnnnn

SEQ ID NO: 603 - DNA, 1188 bp, Homo Sapiens
  misc_feature (866)..(866): n is a, c, g, or t
  misc_feature (924)..(924): n is a, c, g, or t
  misc_feature (935)..(935): n is a, c, g, or t
  misc_feature (937)..(937): n is a, c, g, or t
  misc_feature (951)..(951): n is a, c, g, or t
  misc_feature (963)..(963): n is a, c, g, or t
  misc_feature (981)..(981): n is a, c, g, or t
  misc_feature (991)..(991): n is a, c, g, or t
  misc_feature (1000)..(1000): n is a, c, g, or t
  misc_feature (1003)..(1003): n is a, c, g, or t
  misc_feature (1005)..(1005): n is a, c, g, or t
  misc_feature (1030)..(1030): n is a, c, g, or t
  misc_feature (1050)..(1050): n is a, c, g, or t
  misc_feature (1052)..(1052): n is a, c, g, or t
  misc_feature (1065)..(1065): n is a, c, g, or t
  misc_feature (1078)..(1078): n is a, c, g, or t
  misc_feature (1083)..(1083): n is a, c, g, or t
  misc_feature (1105)..(1105): n is a, c, g, or t
  misc_feature (1122)..(1122): n is a, c, g, or t
  misc_feature (1124)..(1124): n is a, c, g, or t
  misc_feature (1127)..(1127): n is a, c, g, or t
  misc_feature (1141)..(1141): n is a, c, g, or t
  misc_feature (1143)..(1143): n is a, c, g, or t
  misc_feature (1148)..(1148): n is a, c, g, or t
  misc_feature (1155)..(1155): n is a, c, g, or t
  misc_feature (1158)..(1158): n is a, c, g, or t
  misc_feature (1166)..(1166): n is a, c, g, or t
  misc_feature (1168)..(1168): n is a, c, g, or t
  misc_feature (1178)..(1178): n is a, c, g, or t
agagaaattactatgagaggatcgcatcaccatcaccatcacggatcctatttaggtgacactatagaatcgtcgacccacgcgtccgggagaaggtctctgaaggagaaaagcaaagaagctcttttggcctcacaaaagccatttaaatttatagcaagggaggaacagaagcgagcagcccgggaaaagcagctgagagactttcttaagtataaaaagaaaacaaatcgatttaaagccagacccattcctcgatctacttatggttcaactaccaatgacaagttaaaagaagaagagctctatcgaaaccttaggacacagctgagagcccaggagcatttacagaactcatctcctctgccttgtaggtcagcttgcggatgcaggaaccccaggtgtcctgaacaggctgtaaagttgaagtgtaaacacaaggttaggtgcccaactcctgattttgaggaccttcctgagagataccagaaacacctctcagaacacaagtctccaaaactcttaacagtgtgtaaaccatttgatcttcatgcatctccacatgcatctattaaaaaaaaaaaaaaagggcggccgctccctatagtgagtcgtattaagcttaattagctgagcttggactcctgttgatagatccagtaatgacctcagaactccatctggatttgttcagaacgctcggttgccgccgggcgttttttattggtgagaatccaagctagcttggcgagattttcaggagctaaggaagctaaaatggagaaaaaaatcactggatataccaccgttgatatatcccaatggcatcgtaaagaacattttgaggcatttcagtcagttgctcnatgtacctataaccagaccgttcagctggatattacggcctttttaagaccgtaaaanaaaaataagcncnaagttttatccggncctttattcccntttcttgcccgcctgaangaatggctcntcccggaanttncntaagggcaatggaaaaaccggggancctggggaaatggggaaaangnttccccccttgtnaccccgtttttcntggancaaactgaaaccgttttcctcnccccggggagggaaaancnccnacaaattttccggncngtttnctaaccnatnttttcccnanaagggggggnggttaccggg

SEQ ID NO: 604 - DNA, 1200 bp, Homo Sapiens
  misc_feature (1)..(2): n is a, c, g, or t
  misc_feature (18)..(18): n is a, c, g, or t
  misc_feature (872)..(872): n is a, c, g, or t
  misc_feature (874)..(874): n is a, c, g, or t
  misc_feature (896)..(896): n is a, c, g, or t
  misc_feature (902)..(902): n is a, c, g, or t
  misc_feature (928)..(928): n is a, c, g, or t
  misc_feature (952)..(952): n is a, c, g, or t
  misc_feature (966)..(966): n is a, c, g, or t
  misc_feature (979)..(979): n is a, c, g, or t
  misc_feature (988)..(988): n is a, c, g, or t
  misc_feature (1037)..(1037): n is a, c, g, or t
  misc_feature (1042)..(1042): n is a, c, g, or t
  misc_feature (1053)..(1053): n is a, c, g, or t
  misc_feature (1057)..(1057): n is a, c, g, or t
  misc_feature (1062)..(1062): n is a, c, g, or t
  misc_feature (1067)..(1067): n is a, c, g, or t
  misc_feature (1096)..(1096): n is a, c, g, or t
  misc_feature (1102)..(1102): n is a, c, g, or t
  misc_feature (1106)..(1106): n is a, c, g, or t
  misc_feature (1113)..(1113): n is a, c, g, or t
  misc_feature (1118)..(1118): n is a, c, g, or t
  misc_feature (1134)..(1134): n is a, c, g, or t
  misc_feature (1137)..(1137): n is a, c, g, or t
  misc_feature (1143)..(1143): n is a, c, g, or t
  misc_feature (1151)..(1151): n is a, c, g, or t
  misc_feature (1171)..(1171): n is a, c, g, or t
  misc_feature (1178)..(1178): n is a, c, g, or t
  misc_feature (1195)..(1196): n is a, c, g, or t
nnaatagaggaaaattanctatggagaggatcgcatcaccatcaccagtcacggatcctatttaggtgacactatagaatcgtcgacccacgcgtccgcccacgcgtccgctcctccatctctctcaggcacagctgtttggtctagaaatggaggacaggcctcatcgtctcctaattatgaaggacccttacactctttgcaaagccgaattgaagatcgtttagaaagactggatgatgctattcatgttctccggaaccatgcagtgggcccatccacagctatgcctggtggtcatggggacatgcatggaatcattggaccttctcataatggagccatgggtggtctgggctcagggtatggaaccggccttctttcagccaacagacattcactcatggtggggacccatcgtgaagatggcgtggccctgagaggcagccattctcttctgccaaaccaggttccggttccacagcttcctgtccagtctgcgacttcccctgacctgaacccaccccaggacccttacagaggcatgccaccaggactacaggggcagagtgtctcctctggcagctctgagatcaaatccgatgacgagggtgatgagaacctgcaagacacgaaatcttcggaggacaagaaattagatgacgacaagaaggatatcaaatcaattactaggtcaagatctagcaataatgacgatgaggacctgacaccagagcagaaggcagagcgtgagaaggagcggaggatggccaacaatgcccgagagcgtctgcgggtccgtgacatcaacgaggctttcaaagagctcggccgcatggtgcagctccacctcaagaagtgacaagccccanancaagctcctgatcctccaccangcgggnggccgtcatcctcagtctggaagcancaagtccgaaaaaaggaatctgantcccaaaagctgcntgttctgaaaaanaaaggaagnaaaaaaaaggggtcctcggaaacctcccccctcttctccttgggccggncccanaccctggaaangggnaaacncatcnaatcccatggggaaaaaagttaaaagggncccaantttnccaaatngcttnttttaaaaaaaaaaanccnctttcnttaaaagnctttatatctttaaaccccnataaaanctttccccttaaccccnntttt

SEQ ID NO: 605 - DNA, 1200 bp, Homo Sapiens
  misc_feature (1)..(1): n is a, c, g, or t
  misc_feature (5)..(5): n is a, c, g, or t
  misc_feature (853)..(853): n is a, c, g, or t
  misc_feature (886)..(886): n is a, c, g, or t
  misc_feature (888)..(888): n is a, c, g, or t
  misc_feature (910)..(910): n is a, c, g, or t
  misc_feature (940)..(940): n is a, c, g, or t
  misc_feature (949)..(949): n is a, c, g, or t
  misc_feature (984)..(984): n is a, c, g, or t
  misc_feature (990)..(990): n is a, c, g, or t
  misc_feature (996)..(996): n is a, c, g, or t
  misc_feature (1001)..(1001): n is a, c, g, or t
  misc_feature (1007)..(1008): n is a, c, g, or t
  misc_feature (1012)..(1012): n is a, c, g, or t
  misc_feature (1024)..(1024): n is a, c, g, or t
  misc_feature (1042)..(1042): n is a, c, g, or t
  misc_feature (1048)..(1048): n is a, c, g, or t
  misc_feature (1054)..(1055): n is a, c, g, or t
  misc_feature (1092)..(1092): n is a, c, g, or t
  misc_feature (1094)..(1095): n is a, c, g, or t
  misc_feature (1097)..(1097): n is a, c, g, or t
  misc_feature (1109)..(1110): n is a, c, g, or t
  misc_feature (1113)..(1113): n is a, c, g, or t
  misc_feature (1117)..(1118): n is a, c, g, or t
  misc_feature (1127)..(1127): n is a, c, g, or t
  misc_feature (1130)..(1130): n is a, c, g, or t
  misc_feature (1133)..(1133): n is a, c, g, or t
  misc_feature (1145)..(1146): n is a, c, g, or t
  misc_feature (1148)..(1148): n is a, c, g, or t
  misc_feature (1150)..(1151): n is a, c, g, or t
  misc_feature (1155)..(1155): n is a, c, g, or t
  misc_feature (1158)..(1159): n is a, c, g, or t
  misc_feature (1166)..(1166): n is a, c, g, or t
  misc_feature (1169)..(1170): n is a, c, g, or t
  misc_feature (1175)..(1175): n is a, c, g, or t
  misc_feature (1181)..(1181): n is a, c, g, or t
  misc_feature (1193)..(1193): n is a, c, g, or t
  misc_feature (1197)..(1198): n is a, c, g, or t
  misc_feature (1200)..(1200): n is a, c, g, or t
naatnagagaaattactatgagaggatcgcatcaccatcaccatcacggatcctatttaggtgacactatagaatcgtcgacccacgcgtccggccctgagcagacctgaagagctggaggccgaggcggtgttccgggccatcaccattgcgggccggatcaactgccctgtgtacatcaccaaggtcatgagcaagagtgcagccgacatcatcgctctggccaggaagaaagggcccctagtttttggagagcccattgccgccagcctggggaccgatggcacccattactggagcaagaactgggccaaggctgcggcgttcgtgacttcccctcccctgagcccggaccctaccacgcccgactacttgacctccctactggcctgtggggacttgcaggtcacaggcagcggccactgtccctacagcactgcccagaaggcggtgggcaaggacaactttaccctgatccccgagggtgtcaacgggatagaggagcggatgacggtcgtctgggacaaggcggtggctactggcaaaatggatgagaaccagtttgtcgctgtcaccagcaccaatgcagccaagatctttaacctgtacccaaggaaagggcggattgccgtgggctcggatgccgacgtggtcatctgggaccccgacaagttgaagaccataacagccaaaagtcacaagtcggcggtggagtacaacatcttcgagggtatggagtgccacggctccccactagtggtcatcagccagggcaagatcgtctttgaagacggaaacatcaacgtcaacaagggcatgggccgctttcattccgcggaaggcgttcccggancacctgtaccagcgcgtcaaaatcaggaataangntttttggattgcaaggggtttnccaggggcatgtatgacggtcctgtgtacnaggtaccanctacaccccaaaatatgcaactcccgctccttcanccaaantcttcnccttntaaaannccancccccacccatnaaaaaaccttccaccaantccaantttcannttatcaggggcccaaaaaaaataaaaaaaattcccangnncnaccggccacccnntcngggnnccccttggnggnccntccaaattaacnncntnngttnaanntggaatnccnnaaaantacctnaaaaattttggnaaanngn

SEQ ID NO: 606 - DNA, 1200 bp, Homo Sapiens
  misc_feature (2)..(2): n is a, c, g, or t
  misc_feature (936)..(936): n is a, c, g, or t
  misc_feature (982)..(982): n is a, c, g, or t
  misc_feature (995)..(995): n is a, c, g, or t
  misc_feature (998)..(998): n is a, c, g, or t
  misc_feature (1005)..(1005): n is a, c, g, or t
  misc_feature (1011)..(1011): n is a, c, g, or t
  misc_feature (1028)..(1028): n is a, c, g, or t
  misc_feature (1031)..(1031): n is a, c, g, or t
  misc_feature (1034)..(1034): n is a, c, g, or t
  misc_feature (1042)..(1043): n is a, c, g, or t
  misc_feature (1062)..(1062): n is a, c, g, or t
  misc_feature (1069)..(1069): n is a, c, g, or t
  misc_feature (1071)..(1071): n is a, c, g, or t
  misc_feature (1083)..(1083): n is a, c, g, or t
  misc_feature (1096)..(1096): n is a, c, g, or t
  misc_feature (1100)..(1100): n is a, c, g, or t
  misc_feature (1104)..(1104): n is a, c, g, or t
  misc_feature (1109)..(1109): n is a, c, g, or t
  misc_feature (1116)..(1116): n is a, c, g, or t
  misc_feature (1126)..(1126): n is a, c, g, or t
  misc_feature (1128)..(1128): n is a, c, g, or t
  misc_feature (1136)..(1136): n is a, c, g, or t
  misc_feature (1138)..(1138): n is a, c, g, or t
  misc_feature (1148)..(1148): n is a, c, g, or t
  misc_feature (1157)..(1157): n is a, c, g, or t
  misc_feature (1163)..(1163): n is a, c, g, or t
  misc_feature (1171)..(1171): n is a, c, g, or t
  misc_feature (1175)..(1175): n is a, c, g, or t
  misc_feature (1184)..(1184): n is a, c, g, or t
  misc_feature (1191)..(1191): n is a, c, g, or t
  misc_feature (1195)..(1195): n is a, c, g, or t
  misc_feature (1197)..(1197): n is a, c, g, or t
  misc_feature (1199)..(1199): n is a, c, g, or t
gntagaggagaattactatgagaggatcgcatcaccatcaccatcacgggatcctatttaggtgacactatagaatcgtcgacccacgcgtccgcccacgcgtccgctgaagatgatccccaaagtcaacatatgacattaagccaggcatttcaccttaaaaacaatagtaaaaagaaacaaatgactacagaaaaacaaaagcaagatgctaacatgcccaagaaacctgtgcttggatcttatcgtggccagattgttcagtctaagattaattcatttagaaaacctctacaagtcaaagatgagagttctgcagcaacaaagaaactttcagccactatacctaaagccacaaaacctcagcctgtaaacaccagcagtgtaacagtgaaaagtaatagatcctccaatatgactgccactactaaatttgtgagcactacatctcagaacacacaacttgtgcgacctcctattagaagtcatcacagtaatacccgggacactgtgaaacaaggcatcagtagaacctctgccaatgttacaatccggaaagggcctcatgaaaaagaactattacaatcaaaaacagctttatctagtgtcaaaaccagttcttctcaaggtataataagaaataagactctatcaagatccatagcatctgaagttgtagccaggcctgcttcattgtctaatgataaactgatggaaaagtcagagcccgttgaccagcgaagacatactgcaggaaaagcaattgttgatagtagatcagctcagcccaaagaaacctcggaagagagaaaagctcgtctgagtgagtggaaagctggcaaaggaagagtgctaaaaaggccccctaattcagtagttactcagcatgagcctgcaggacaaatgaaaaaccagttgggtctttttggactaccntggcagaagaagatgaccaagattatttctggaaaaagtaaacacncatttttctgaangcntgaactngattanggagggatgtccaaaanaanaanactggtcnnctgaatgacctgataaaantattccnangccaaaagctgnttagatttggaantgtnttgnccttntggaccnatcccagtcntntggaaaantnttgcaatctngaaaagccntttggnggggctcncctntgaaaatgncaccccnattngnant

SEQ ID NO: 607 - DNA, 1323 bp, Homo Sapiens
  misc_feature (921)..(921): n is a, c, g, or t
  misc_feature (927)..(927): n is a, c, g, or t
  misc_feature (971)..(971): n is a, c, g, or t
  misc_feature (987)..(987): n is a, c, g, or t
  misc_feature (1009)..(1009): n is a, c, g, or t
  misc_feature (1019)..(1019): n is a, c, g, or t
  misc_feature (1023)..(1023): n is a, c, g, or t
  misc_feature (1058)..(1058): n is a, c, g, or t
  misc_feature (1074)..(1074): n is a, c, g, or t
  misc_feature (1076)..(1076): n is a, c, g, or t
  misc_feature (1090)..(1090): n is a, c, g, or t
  misc_feature (1093)..(1093): n is a, c, g, or t
  misc_feature (1095)..(1095): n is a, c, g, or t
  misc_feature (1097)..(1097): n is a, c, g, or t
  misc_feature (1106)..(1106): n is a, c, g, or t
  misc_feature (1108)..(1108): n is a, c, g, or t
  misc_feature (1111)..(1111): n is a, c, g, or t
  misc_feature (1114)..(1115): n is a, c, g, or t
  misc_feature (1122)..(1123): n is a, c, g, or t
  misc_feature (1134)..(1134): n is a, c, g, or t
  misc_feature (1147)..(1147): n is a, c, g, or t
  misc_feature (1156)..(1156): n is a, c, g, or t
  misc_feature (1163)..(1163): n is a, c, g, or t
  misc_feature (1178)..(1178): n is a, c, g, or t
  misc_feature (1189)..(1189): n is a, c, g, or t
  misc_feature (1191)..(1191): n is a, c, g, or t
  misc_feature (1198)..(1201): n is a, c, g, or t
  misc_feature (1207)..(1207): n is a, c, g, or t
  misc_feature (1213)..(1213): n is a, c, g, or t
  misc_feature (1215)..(1215): n is a, c, g, or t
  misc_feature (1218)..(1218): n is a, c, g, or t
  misc_feature (1221)..(1221): n is a, c, g, or t
  misc_feature (1223)..(1223): n is a, c, g, or t
  misc_feature (1225)..(1225): n is a, c, g, or t
  misc_feature (1232)..(1232): n is a, c, g, or t
  misc_feature (1234)..(1236): n is a, c, g, or t
  misc_feature (1242)..(1242): n is a, c, g, or t
  misc_feature (1245)..(1245): n is a, c, g, or t
  misc_feature (1248)..(1248): n is a, c, g, or t
  misc_feature (1251)..(1251): n is a, c, g, or t
  misc_feature (1268)..(1268): n is a, c, g, or t
  misc_feature (1273)..(1273): n is a, c, g, or t
  misc_feature (1275)..(1275): n is a, c, g, or t
  misc_feature (1277)..(1277): n is a, c, g, or t
  misc_feature (1279)..(1279): n is a, c, g, or t
  misc_feature (1285)..(1285): n is a, c, g, or t
  misc_feature (1288)..(1288): n is a, c, g, or t
  misc_feature (1292)..(1292): n is a, c, g, or t
  misc_feature (1294)..(1294): n is a, c, g, or t
  misc_feature (1299)..(1299): n is a, c, g, or t
  misc_feature (1310)..(1310): n is a, c, g, or t
  misc_feature (1313)..(1313): n is a, c, g, or t
  misc_feature (1315)..(1316): n is a, c, g, or t
  misc_feature (1322)..(1322): n is a, c, g, or t
tagagaaattactatgagaggatcgcatcaccatcaccatcacggatcctatttaggtgacactatagaatcgtcgacccacgcgtccgggccctgccctgctctactctgcgctctctgcccgcgccgccgccgcctcagcctcggccctgcgctgcgcgcccggcccgtgctgccatggcctgccgcccgcgaagcccgccgaggcatcagagccgctgcgacggtgacgccagcccgccgtcccccgcgcgatggagcctgggacggaagcgcagagccgacggcaggcgctggaggcccgaagacgccgaggaggcagagcaccgcggcgccgagcgcagacccgagagctttaccactcctgaaggccctaaaccccgttccagatgctctgactgggcaagtgcagttgaagaagatgaaatgaggaccagagttaacaaagaaatggcaagatataaaaggaaactcctcatcaatgactttggaagagagagaaaatcatcatcaggaagttctgattcaaaggagtctatgtctactgtgccggctgactttgagacagatgaaagtgtcctaatgaggagacagaagcagatcaactatgggaagaacacaattgcctatgatcgttatattaaagaagtcccaagacaccttcgacaacctggcattcatcccaagacccctaataaatttaagaagtatagtcgacgttcatgggaccagcaaatcaaactctggaaggtggctctgcatttttgggatcctccagcggaagaaggatgtgatttgcaagaaatacaccctgtagaccttgaatctgcaaaaagcagctccgagccccagaccagctctcaggatgactttgatgtgtactctggcacacccaccaaggtgagacacatggacagtcangtgganggatgagtttgatttggaagcttgtttaactgaacccttgaaanacttctcagccatganctactgccccctggcggccagnaaaaaaaacnctcntccccgactaggtggaaggttggccaggccccaancatggggggggcattntnactgggggtttttnttntnancaatccatnanctnagnntgaattnnttttgccttanttttttaaaaaantttattttnttttaanggggttatttttgcntttttaaattngnaaggggnnnnaatccnaaaaantnttnaancntntttcccnannntttttnggnaanccnggtttccccagggaaanttaancntntnaaaaanggntttncnagggnttttttttttnttntnnggggang

SEQ ID NO: 608 - DNA, 1391 bp, Homo Sapiens
  misc_feature (822)..(822): n is a, c, g, or t
  misc_feature (847)..(847): n is a, c, g, or t
  misc_feature (884)..(884): n is a, c, g, or t
  misc_feature (892)..(892): n is a, c, g, or t
  misc_feature (911)..(911): n is a, c, g, or t
  misc_feature (926)..(926): n is a, c, g, or t
  misc_feature (931)..(931): n is a, c, g, or t
  misc_feature (938)..(938): n is a, c, g, or t
  misc_feature (940)..(940): n is a, c, g, or t
  misc_feature (943)..(943): n is a, c, g, or t
  misc_feature (947)..(947): n is a, c, g, or t
  misc_feature (950)..(950): n is a, c, g, or t
  misc_feature (955)..(955): n is a, c, g, or t
  misc_feature (958)..(958): n is a, c, g, or t
  misc_feature (979)..(979): n is a, c, g, or t
  misc_feature (982)..(982): n is a, c, g, or t
  misc_feature (986)..(986): n is a, c, g, or t
  misc_feature (992)..(992): n is a, c, g, or t
  misc_feature (1010)..(1010): n is a, c, g, or t
  misc_feature (1018)..(1018): n is a, c, g, or t
  misc_feature (1023)..(1067): n is a, c, g, or t
  misc_feature (1072)..(1072): n is a, c, g, or t
  misc_feature (1077)..(1077): n is a, c, g, or t
  misc_feature (1080)..(1080): n is a, c, g, or t
  misc_feature (1083)..(1085): n is a, c, g, or t
  misc_feature (1087)..(1087): n is a, c, g, or t
  misc_feature (1090)..(1095): n is a, c, g, or t
  misc_feature (1098)..(1098): n is a, c, g, or t
  misc_feature (1101)..(1101): n is a, c, g, or t
  misc_feature (1106)..(1106): n is a, c, g, or t
  misc_feature (1108)..(1108): n is a, c, g, or t
  misc_feature (1110)..(1112): n is a, c, g, or t
  misc_feature (1115)..(1115): n is a, c, g, or t
  misc_feature (1120)..(1123): n is a, c, g, or t
  misc_feature (1126)..(1126): n is a, c, g, or t
  misc_feature (1129)..(1130): n is a, c, g, or t
  misc_feature (1138)..(1139): n is a, c, g, or t
  misc_feature (1142)..(1142): n is a, c, g, or t
  misc_feature (1144)..(1145): n is a, c, g, or t
  misc_feature (1147)..(1147): n is a, c, g, or t
  misc_feature (1149)..(1149): n is a, c, g, or t
  misc_feature (1153)..(1154): n is a, c, g, or t
  misc_feature (1157)..(1159): n is a, c, g, or t
  misc_feature (1168)..(1169): n is a, c, g, or t
  misc_feature (1174)..(1174): n is a, c, g, or t
  misc_feature (1177)..(1177): n is a, c, g, or t
  misc_feature (1180)..(1180): n is a, c, g, or t
  misc_feature (1182)..(1183): n is a, c, g, or t
  misc_feature (1187)..(1187): n is a, c, g, or t
  misc_feature (1191)..(1191): n is a, c, g, or t
  misc_feature (1198)..(1198): n is a, c, g, or t
  misc_feature (1200)..(1200): n is a, c, g, or t
  misc_feature (1204)..(1204): n is a, c, g, or t
  misc_feature (1208)..(1208): n is a, c, g, or t
  misc_feature (1211)..(1216): n is a, c, g, or t
  misc_feature (1219)..(1219): n is a, c, g, or t
  misc_feature (1221)..(1223): n is a, c, g, or t
  misc_feature (1225)..(1225): n is a, c, g, or t
  misc_feature (1230)..(1231): n is a, c, g, or t
  misc_feature (1233)..(1245): n is a, c, g, or t
  misc_feature (1247)..(1248): n is a, c, g, or t
  misc_feature (1251)..(1251): n is a, c, g, or t
  misc_feature (1258)..(1261): n is a, c, g, or t
  misc_feature (1264)..(1267): n is a, c, g, or t
  misc_feature (1272)..(1275): n is a, c, g, or t
  misc_feature (1277)..(1280): n is a, c, g, or t
  misc_feature (1283)..(1284): n is a, c, g, or t
  misc_feature (1287)..(1292): n is a, c, g, or t
  misc_feature (1302)..(1302): n is a, c, g, or t
  misc_feature (1304)..(1306): n is a, c, g, or t
  misc_feature (1310)..(1326): n is a, c, g, or t
  misc_feature (1328)..(1345): n is a, c, g, or t
  misc_feature (1347)..(1350): n is a, c, g, or t
  misc_feature (1354)..(1355): n is a, c, g, or t
  misc_feature (1358)..(1360): n is a, c, g, or t
  misc_feature (1369)..(1372): n is a, c, g, or t
  misc_feature (1378)..(1381): n is a, c, g, or t
  misc_feature (1391)..(1391): n is a, c, g, or t
tagaggaaaattactatgaagaggatcgcatcaccattcaccatcacggatcctatttaggtgacactatagaatcgtcgacccacgcgtccgagaagatcccgcggttgttggtgggtgccgccgacgggtacctgtacatgtacaacctggacccccaggagggcggcgagtgtgccctgatgaagcagcaccggctggacggcagtctggaaacgaccaatgagatcttggactctgcctctcacgactgccccttagtcactcagacatacggcgcagctgcaggaaaaggtacttacgtgccttcatccccaacgagacttgcctacacagacgacctgggtgctgtgggtggcgcctgcctggaggacgaggccagcgccctgcgcctggatgaggacagcgagcacccgcccatgattcttcggactgactgaacttgacctgtgacctctgacccggggagcagagaacactggcttcacagaggactttgtgcattgctgctatgaactttgacctgagtcgggggagaggatggcagagactttattaaaaaaaaaaaaagattgtagtggtagtctaactccataacgctgaggaaatacatcattttcacttcagtggcttttaaatcctgcttatgaattttagctttttgtttgtttgttttctctttttgccaaaattaactgtttggtgaagcccgcaaaacctcctcgctttgcatgcatgaacgtgccaagccagcataggggagctagaagccactttccagccacctgccgttgggttttttcatatctgtacataatgccnagtgcgtaaggaaaccgtggcgtcncgcacagtgggtctgcttgtcaaggccagttctgcantgacaggncccaggggctgcccaccangtgtgctgggcaaanttcanctgggananaantccnatntcccntanggccccacctggaacattttnccnccgnttttantttggttaattaaatttntttccaanttggnnnnnnnnnnnnnnnnnnnnnnnnnnnnnnnnnnnnnnnnnnnnnggggnggccnctnccnnnanggnnnnnnatnaancttantnannnaanttggnnnnccngtnnaaaatccnnaangnncncnaaannccnnnggatttttnnaaaanccnggntnncccngggnttttttntngggnaaanccnnnnnnttngnnnanttttnngnnnnnnnnnnnnnannggnaaaaaannnnggnnnnccccnnnnannnnccnnggnnnnnnaaaaattttngnnntttnnnnnnnnnnnnnnnnnannnnnnnnnnnnnnnnnnannnntttnnaannnaaaaaaaannnntttttnnnntttttttttn

SEQ ID NO: 609 - DNA, 1381 bp, Homo Sapiens
  misc_feature (761)..(761): n is a, c, g, or t
  misc_feature (833)..(833): n is a, c, g, or t
  misc_feature (835)..(835): n is a, c, g, or t
  misc_feature (838)..(838): n is a, c, g, or t
  misc_feature (861)..(861): n is a, c, g, or t
  misc_feature (863)..(863): n is a, c, g, or t
  misc_feature (874)..(874): n is a, c, g, or t
  misc_feature (936)..(936): n is a, c, g, or t
  misc_feature (963)..(963): n is a, c, g, or t
  misc_feature (965)..(965): n is a, c, g, or t
  misc_feature (1001)..(1001): n is a, c, g, or t
  misc_feature (1019)..(1019): n is a, c, g, or t
  misc_feature (1028)..(1028): n is a, c, g, or t
  misc_feature (1037)..(1037): n is a, c, g, or t
  misc_feature (1049)..(1049): n is a, c, g, or t
  misc_feature (1053)..(1053): n is a, c, g, or t
  misc_feature (1057)..(1057): n is a, c, g, or t
  misc_feature (1069)..(1069): n is a, c, g, or t
  misc_feature (1072)..(1072): n is a, c, g, or t
  misc_feature (1077)..(1077): n is a, c, g, or t
  misc_feature (1084)..(1084): n is a, c, g, or t
  misc_feature (1106)..(1106): n is a, c, g, or t
  misc_feature (1111)..(1111): n is a, c, g, or t
  misc_feature (1113)..(1113): n is a, c, g, or t
  misc_feature (1119)..(1119): n is a, c, g, or t
  misc_feature (1122)..(1122): n is a, c, g, or t
  misc_feature (1129)..(1129): n is a, c, g, or t
  misc_feature (1131)..(1131): n is a, c, g, or t
  misc_feature (1135)..(1135): n is a, c, g, or t
  misc_feature (1137)..(1137): n is a, c, g, or t
  misc_feature (1143)..(1143): n is a, c, g, or t
  misc_feature (1145)..(1145): n is a, c, g, or t
  misc_feature (1147)..(1147): n is a, c, g, or t
  misc_feature (1155)..(1155): n is a, c, g, or t
  misc_feature (1161)..(1161): n is a, c, g, or t
  misc_feature (1166)..(1166): n is a, c, g, or t
  misc_feature (1169)..(1169): n is a, c, g, or t
  misc_feature (1175)..(1176): n is a, c, g, or t
  misc_feature (1179)..(1179): n is a, c, g, or t
  misc_feature (1211)..(1211): n is a, c, g, or t
  misc_feature (1213)..(1214): n is a, c, g, or t
  misc_feature (1216)..(1216): n is a, c, g, or t
  misc_feature (1220)..(1220): n is a, c, g, or t
  misc_feature (1224)..(1224): n is a, c, g, or t
  misc_feature (1228)..(1228): n is a, c, g, or t
  misc_feature (1230)..(1230): n is a, c, g, or t
  misc_feature (1253)..(1253): n is a, c, g, or t
  misc_feature (1257)..(1257): n is a, c, g, or t
  misc_feature (1260)..(1260): n is a, c, g, or t
  misc_feature (1265)..(1265): n is a, c, g, or t
  misc_feature (1268)..(1271): n is a, c, g, or t
  misc_feature (1283)..(1283): n is a, c, g, or t
  misc_feature (1285)..(1289): n is a, c, g, or t
  misc_feature (1292)..(1293): n is a, c, g, or t
  misc_feature (1299)..(1300): n is a, c, g, or t
  misc_feature (1304)..(1306): n is a, c, g, or t
  misc_feature (1309)..(1309): n is a, c, g, or t
  misc_feature (1318)..(1318): n is a, c, g, or t
  misc_feature (1320)..(1321): n is a, c, g, or t
  misc_feature (1327)..(1327): n is a, c, g, or t
  misc_feature (1329)..(1329): n is a, c, g, or t
  misc_feature (1332)..(1333): n is a, c, g, or t
  misc_feature (1336)..(1336): n is a, c, g, or t
  misc_feature (1338)..(1339): n is a, c, g, or t
  misc_feature (1349)..(1350): n is a, c, g, or t
  misc_feature (1358)..(1358): n is a, c, g, or t
  misc_feature (1360)..(1367): n is a, c, g, or t
  misc_feature (1370)..(1379): n is a, c, g, or t
  misc_feature (1381)..(1381): n is a, c, g, or t
gaaattactatgagaggatcgcatcaccatcaccatcacggatcctatttaggtgacactatagaatcgtcgacccacgcgtccggccgcgatgtctccggcggctgcggcggctggagcaggcgagcggcggcggccgatagcgagtgtcagggccggccggggcggcgcttctcggcctgtcgctggtcggcctcctactgtacctcgtgcctgctgcggctgcgctggcctggctggccgtggggactaccgcggcctggtggggactgagccgcgagccccgaggttcgcgccccttgtcctccttcgttcagaaggcgcgacatcggcgaacactgttcgcttcgcctccggccaagtcgacagccaacggaaacctcctagagccgcggaccctgctcgaaggacctgaccctgccgaactgctcctcatgggcagttacctgggcaagcccgggccgccgcagcccgcccccgctccggagggccaggacctgcggaataggcctggccgccgcccacccgcccgcccggcgccgcgctccacaccgccctccccgccgacccatcgcgttcaccacttttacccctctctccccactcctcttctccgaccctccgggaggccttccccacgggatcgtgggactttaccagatcggtttgtaataacacctcaaagacgctatccgatccatcaggcccagtattcctgtctgggggtacttcccacagtgtgctggaatggttatcacaanaaggctgtgctgtcccctcgcaactccaggatggtgtgtagcccagtgactctgaagatcgcccctcctgananaanattttcgcgttctgcgataccanancaaataatcanctcaacactgtcctcaccatcaagtaatgccccaaaaccatgtgcaaagaaactgtactgantgccctcaaaaaaaaaaaaaaaaaagnanagtggaagaaaaaaacaaatatttcttgatggccanaaaaaaaaaaaaactttntttgtcaangtctcattnatgcctttttgnattnaaanttcctcaaaccnggncaaanaaattcnatttaaaagggaattttttccnttttntnaataanccnaaaaatnanatantnccctgncncntaaagtcnccttanttaanagnaccaannaantcaaaaggctttttttttaaaaactttaaaantnntncaangaangccngntaaattttaattttaaaaggaantggnctncaacnttnnnnaaaacctttttnannnnntcnntttttnnaccnnnttnaaaaaaaanannggggcntnttnnaanannaaaaaaaaanntttttaanannnnnnnnaannnnnnnnnntn

SEQ ID NO: 610 - DNA, 1430 bp, Homo Sapiens
  misc_feature (905)..(905): n is a, c, g, or t
  misc_feature (913)..(913): n is a, c, g, or t
  misc_feature (920)..(920): n is a, c, g, or t
  misc_feature (939)..(939): n is a, c, g, or t
  misc_feature (941)..(941): n is a, c, g, or t
  misc_feature (944)..(944): n is a, c, g, or t
  misc_feature (969)..(969): n is a, c, g, or t
  misc_feature (992)..(992): n is a, c, g, or t
  misc_feature (1004)..(1004): n is a, c, g, or t
  misc_feature (1011)..(1011): n is a, c, g, or t
  misc_feature (1017)..(1017): n is a, c, g, or t
  misc_feature (1025)..(1025): n is a, c, g, or t
  misc_feature (1030)..(1030): n is a, c, g, or t
  misc_feature (1035)..(1035): n is a, c, g, or t
  misc_feature (1042)..(1042): n is a, c, g, or t
  misc_feature (1056)..(1056): n is a, c, g, or t
  misc_feature (1068)..(1068): n is a, c, g, or t
  misc_feature (1071)..(1072): n is a, c, g, or t
  misc_feature (1074)..(1074): n is a, c, g, or t
  misc_feature (1090)..(1090): n is a, c, g, or t
  misc_feature (1108)..(1108): n is a, c, g, or t
  misc_feature (1127)..(1127): n is a, c, g, or t
  misc_feature (1133)..(1133): n is a, c, g, or t
  misc_feature (1137)..(1137): n is a, c, g, or t
  misc_feature (1142)..(1142): n is a, c, g, or t
  misc_feature (1148)..(1150): n is a, c, g, or t
  misc_feature (1153)..(1174): n is a, c, g, or t
  misc_feature (1180)..(1180): n is a, c, g, or t
  misc_feature (1182)..(1182): n is a, c, g, or t
  misc_feature (1190)..(1190): n is a, c, g, or t
  misc_feature (1193)..(1193): n is a, c, g, or t
  misc_feature (1197)..(1197): n is a, c, g, or t
  misc_feature (1200)..(1200): n is a, c, g, or t
  misc_feature (1203)..(1203): n is a, c, g, or t
  misc_feature (1211)..(1211): n is a, c, g, or t
  misc_feature (1215)..(1215): n is a, c, g, or t
  misc_feature (1220)..(1220): n is a, c, g, or t
  misc_feature (1222)..(1222): n is a, c, g, or t
  misc_feature (1226)..(1226): n is a, c, g, or t
  misc_feature (1228)..(1228): n is a, c, g, or t
  misc_feature (1237)..(1237): n is a, c, g, or t
  misc_feature (1240)..(1241): n is a, c, g, or t
  misc_feature (1246)..(1246): n is a, c, g, or t
  misc_feature (1254)..(1255): n is a, c, g, or t
  misc_feature (1263)..(1263): n is a, c, g, or t
  misc_feature (1268)..(1269): n is a, c, g, or t
  misc_feature (1272)..(1272): n is a, c, g, or t
  misc_feature (1282)..(1282): n is a, c, g, or t
  misc_feature (1290)..(1290): n is a, c, g, or t
  misc_feature (1292)..(1292): n is a, c, g, or t
  misc_feature (1297)..(1299): n is a, c, g, or t
  misc_feature (1301)..(1301): n is a, c, g, or t
  misc_feature (1306)..(1307): n is a, c, g, or t
  misc_feature (1312)..(1312): n is a, c, g, or t
  misc_feature (1317)..(1317): n is a, c, g, or t
  misc_feature (1319)..(1319): n is a, c, g, or t
  misc_feature (1322)..(1322): n is a, c, g, or t
  misc_feature (1326)..(1326): n is a, c, g, or t
  misc_feature (1336)..(1336): n is a, c, g, or t
  misc_feature (1338)..(1338): n is a, c, g, or t
  misc_feature (1341)..(1342): n is a, c, g, or t
  misc_feature (1347)..(1347): n is a, c, g, or t
  misc_feature (1355)..(1355): n is a, c, g, or t
  misc_feature (1357)..(1357): n is a, c, g, or t
  misc_feature (1371)..(1371): n is a, c, g, or t
  misc_feature (1374)..(1378): n is a, c, g, or t
  misc_feature (1380)..(1384): n is a, c, g, or t
  misc_feature (1396)..(1396): n is a, c, g, or t
  misc_feature (1401)..(1401): n is a, c, g, or t
  misc_feature (1414)..(1414): n is a, c, g, or t
  misc_feature (1417)..(1417): n is a, c, g, or t
  misc_feature (1425)..(1425): n is a, c, g, or t
agaaattactatgagaggatcgcatcaccatcaccatcacggatcctatttaggtgacactatagaatcgtcgacccacgcgtccgatttctgccgggcgctccgcgaagatgcagctcaagccgatggagatcaaccccgagatgctgaacaaagtgctgtcccggctgggggtcgccggccagtggcgcttcgtggacgtgctggggctggaagaggagtctctgggctcggtgccagcgcctgcctgcgcgctgctgctgctgtttcccctcacggcccagcatgagaacttcaggaaaaagcagattgaagagctgaagggacaagaagttagtcctaaagtgtacttcatgaagcagaccattgggaattcctgtggcacaatcggacttattcacgcagtggccaataatcaagacaaactgggatttgaggatggatcagttctgaaacagtttctttctgaaacagagaaaatgtcccctgaagacagagcaaaatgctttgaaaagaatgaggccatacaggcagcccatgatgccgtggcacaggaaggccaatgtcgggtagatgacaaggtgaatttccattttattctgtttaacaacgtggatggccacctctatgaacttgatggacgaatgccttttccggtgaaccatggcgccagttcagaggacaccctgctgaaggacgctgccaaggtctgcagagaattcaccgagcgtgagcaaggagaagtccgcttctctgccgtggctctctgcaaggcagcctaatgctctgtgggagggactttgctgatttcccctcttccccttcaacatgaaaatatatacccccccatgcagtctaaaatgcttcagtactttgtgaaacacagctgttcttctgttctgcanacacgccnttccccntcagccacacccaggcacntnaancccaagcagagtgcacagctgtccnctgggccattgtggtgggagctncaaatggggaancattccnccccanggtatgtnttgtntccanatctaancctttaaatggccnactttggtttcnggnngnaaattaaaaaccttgnaaggggtttaattgtttncccccaaaggaaaaaaaanttttcngctnaaaanataaannnaannnnnnnnnnnnnnnnnnnnnnaagggngncccccccnaangggnccnaanaacttaanactnactgnancccntnaaaaacccnaannccccnaaaccccnngatttttnaaacnncgnttccccgggntttttttngnaaacnnntnttggnnttttnggacntngancaanggaaaaaaancnggnnccccnttattccngncccaaaaatttggnttnnnnntnnnnnaaaaaacccggnaaccnttaaaaaaaaaanttncccttttntcccg

SEQ ID NO: 611 - DNA, 1329 bp, Homo Sapiens
  misc_feature (2)..(3): n is a, c, g, or t
  misc_feature (626)..(626): n is a, c, g, or t
  misc_feature (858)..(858): n is a, c, g, or t
  misc_feature (896)..(896): n is a, c, g, or t
  misc_feature (904)..(904): n is a, c, g, or t
  misc_feature (906)..(906): n is a, c, g, or t
  misc_feature (917)..(917): n is a, c, g, or t
  misc_feature (937)..(937): n is a, c, g, or t
  misc_feature (948)..(948): n is a, c, g, or t
  misc_feature (952)..(952): n is a, c, g, or t
  misc_feature (962)..(962): n is a, c, g, or t
  misc_feature (994)..(994): n is a, c, g, or t
  misc_feature (1001)..(1001): n is a, c, g, or t
  misc_feature (1007)..(1007): n is a, c, g, or t
  misc_feature (1017)..(1017): n is a, c, g, or t
  misc_feature (1036)..(1036): n is a, c, g, or t
  misc_feature (1042)..(1042): n is a, c, g, or t
  misc_feature (1054)..(1055): n is a, c, g, or t
  misc_feature (1058)..(1058): n is a, c, g, or t
  misc_feature (1072)..(1073): n is a, c, g, or t
  misc_feature (1086)..(1087): n is a, c, g, or t
  misc_feature (1090)..(1090): n is a, c, g, or t
  misc_feature (1124)..(1124): n is a, c, g, or t
  misc_feature (1129)..(1129): n is a, c, g, or t
  misc_feature (1133)..(1133): n is a, c, g, or t
  misc_feature (1135)..(1135): n is a, c, g, or t
  misc_feature (1140)..(1141): n is a, c, g, or t
  misc_feature (1148)..(1148): n is a, c, g, or t
  misc_feature (1163)..(1163): n is a, c, g, or t
  misc_feature (1169)..(1169): n is a, c, g, or t
  misc_feature (1171)..(1171): n is a, c, g, or t
  misc_feature (1184)..(1184): n is a, c, g, or t
  misc_feature (1190)..(1190): n is a, c, g, or t
  misc_feature (1196)..(1198): n is a, c, g, or t
  misc_feature (1203)..(1203): n is a, c, g, or t
  misc_feature (1206)..(1206): n is a, c, g, or t
  misc_feature (1219)..(1219): n is a, c, g, or t
  misc_feature (1221)..(1221): n is a, c, g, or t
  misc_feature (1225)..(1225): n is a, c, g, or t
  misc_feature (1239)..(1240): n is a, c, g, or t
  misc_feature (1243)..(1243): n is a, c, g, or t
  misc_feature (1247)..(1247): n is a, c, g, or t
  misc_feature (1258)..(1258): n is a, c, g, or t
  misc_feature (1265)..(1265): n is a, c, g, or t
  misc_feature (1269)..(1269): n is a, c, g, or t
  misc_feature (1306)..(1307): n is a, c, g, or t
  misc_feature (1311)..(1311): n is a, c, g, or t
  misc_feature (1317)..(1317): n is a, c, g, or t
  misc_feature (1319)..(1319): n is a, c, g, or t
annaaatagaggaaattactatgagaggatcgcatcaccatcaccatcacggaatcctatttagggtgacacatatagaatcgtcgacccacgcgtccgctggcacaatgggtttcaatgaatttaaagaactctgggctgtactgaatggctggagacaacactttatcagttttgacactgacaggagtggaacagtagacccacaagaattgcagaaggccctgacaacaatgggatttaggttgagtccccaggctgtgaattcaattgcaaaacgatacagcaccaatggaaagatcaccttcgacgactacatcgcctgctgcgtcaaactgagggctcttacagacagctttcgaagacgggatactgctcagcaaggtgttgtgaatttcccatatgatgatttcattcaatgtgtcatgagtgtttaaatcaagaggaagctgcatgaatgtaatcaacattccaactggagctctcctttgcttgtcctctttgccttcggtaatatgtataaacttacatcacgactttctcttaacagctgttgtaaagtttattactttatgtacaactgaagttttgttttagttttgataataaattctttggaactttantaaaaaaaaaaaaaaaaaaaaaaaaaagggcggccgctccctatagtgagtcgtattaagcttaattagctgagcttggactcctgttgatagatccagtaatgacctcagaactccatctggatttgttcaaaacgctcggttgccgccgggcgttttttattggtgagaatccaagctagcttggcgagattttcaggagctaaggaagctaaaatggaaaaaaaaatcnctggaaataccaccgttgaaatatcccaatggcatcgnaaaaaaananttttgaggcantttcagtcagttgcctcaangtacctataanccanaaccgtttcnagctggatataacggcccctttttaaagaacngtaaaanaaaaanaaagcccaantttttatcccggccttttntttcanattccttgcccnnccngaagaaatgccccnncccggaatttccnnaanggcaaatgaaaaaaacgggggaaccgggggaaanttggnaaananggttnnccccttnttaaccccgtttttncatggnancaaaatggaaaantttttncccccnnntgggnggnaaaaccccgaacnantttnccgggattttttcnncantttnttccccaaaanagggggnggtnaagggaaaaaccgggccctatttccccaaaagggttnntttnaaaaanantttttccccc

SEQ ID NO: 612 - DNA, 1331 bp, Homo Sapiens
  misc_feature (1)..(1): n is a, c, g, or t
  misc_feature (923)..(923): n is a, c, g, or t
  misc_feature (945)..(945): n is a, c, g, or t
  misc_feature (970)..(971): n is a, c, g, or t
  misc_feature (983)..(983): n is a, c, g, or t
  misc_feature (988)..(988): n is a, c, g, or t
  misc_feature (996)..(996): n is a, c, g, or t
  misc_feature (1000)..(1000): n is a, c, g, or t
  misc_feature (1003)..(1003): n is a, c, g, or t
  misc_feature (1010)..(1010): n is a, c, g, or t
  misc_feature (1013)..(1013): n is a, c, g, or t
  misc_feature (1017)..(1017): n is a, c, g, or t
  misc_feature (1022)..(1022): n is a, c, g, or t
  misc_feature (1029)..(1029): n is a, c, g, or t
  misc_feature (1046)..(1046): n is a, c, g, or t
  misc_feature (1053)..(1053): n is a, c, g, or t
  misc_feature (1070)..(1070): n is a, c, g, or t
  misc_feature (1073)..(1073): n is a, c, g, or t
  misc_feature (1075)..(1075): n is a, c, g, or t
  misc_feature (1084)..(1084): n is a, c, g, or t
  misc_feature (1095)..(1095): n is a, c, g, or t
  misc_feature (1102)..(1102): n is a, c, g, or t
  misc_feature (1105)..(1105): n is a, c, g, or t
  misc_feature (1107)..(1107): n is a, c, g, or t
  misc_feature (1111)..(1111): n is a, c, g, or t
  misc_feature (1119)..(1119): n is a, c, g, or t
  misc_feature (1121)..(1121): n is a, c, g, or t
  misc_feature (1126)..(1127): n is a, c, g, or t
  misc_feature (1148)..(1148): n is a, c, g, or t
  misc_feature (1151)..(1151): n is a, c, g, or t
  misc_feature (1155)..(1155): n is a, c, g, or t
  misc_feature (1162)..(1162): n is a, c, g, or t
  misc_feature (1171)..(1171): n is a, c, g, or t
  misc_feature (1175)..(1175): n is a, c, g, or t
  misc_feature (1177)..(1177): n is a, c, g, or t
  misc_feature (1194)..(1194): n is a, c, g, or t
  misc_feature (1205)..(1205): n is a, c, g, or t
  misc_feature (1215)..(1216): n is a, c, g, or t
  misc_feature (1224)..(1225): n is a, c, g, or t
  misc_feature (1229)..(1229): n is a, c, g, or t
  misc_feature (1238)..(1238): n is a, c, g, or t
  misc_feature (1242)..(1242): n is a, c, g, or t
  misc_feature (1258)..(1258): n is a, c, g, or t
  misc_feature (1260)..(1260): n is a, c, g, or t
  misc_feature (1273)..(1273): n is a, c, g, or t
  misc_feature (1276)..(1276): n is a, c, g, or t
  misc_feature (1278)..(1279): n is a, c, g, or t
  misc_feature (1283)..(1283): n is a, c, g, or t
  misc_feature (1292)..(1293): n is a, c, g, or t
  misc_feature (1296)..(1296): n is a, c, g, or t
  misc_feature (1301)..(1308): n is a, c, g, or t
  misc_feature (1314)..(1314): n is a, c, g, or t
  misc_feature (1316)..(1318): n is a, c, g, or t
  misc_feature (1320)..(1321): n is a, c, g, or t
  misc_feature (1323)..(1324): n is a, c, g, or t
  misc_feature (1328)..(1328): n is a, c, g, or t
  misc_feature (1331)..(1331): n is a, c, g, or t
naatagagaaattactatgagaggatcgcatcaccatcaccatcacggatcctatttaggtgacactatagaatcgtcgacccacgcgtccgggacagtattgttgaagttcacaacaaatttggggatgggtgggaatacggtcgacgagactcctccggtattcaacttcatgacattgtcctgtcatgtggaactgtagggaatagtggatgatggcgacagtggtgaaatatagctcgggctttaggatttgtcatatgtctaatgaggcttgacatgcaagtactattaaaatctccttagcatacgttgttttcctgattactggggtggaccttaagttgtctcatgtaataggtgtatcaactgatgtgtgatagacattaatatgacagctgttatggatacagtctatacaaaatgagatcctttcataagcttgaagattggggtttcacgctcatgtgtgagatgtccctctctcaaaccttactatgaagtcagcaccactgggcacattacttgtctgacatgaaggggaaaaagtaaaacaaaatgtaaataaggagtaaagcatgtacttaaaatatattcttattctatcataggataaatcttcagacaaaaaagtgcaaacaaaagggaaaaggggagcaaagggaaaacaggccgaagtggctaaccaagaaactaaagaagacttacctgcggaaaacggggaaacgaagactgaggagagtccagcctctgatgaagcaggagagaaagaagccaagtctgattaataaccatataccatgtcttatcagtggtccctgtctcccttcttgtacaatccagaggaatatttttatcaactattttgtaaatgcaagttttttagtagctctagaaacatttttaaaaaggagggaatcccncctcatcccattttttaagtgnaatgctttttttttaaaaggggaanncatttgctggtngttantttttggnacanccnaaaatantgngggnaaatngaattangggaaggctctgactgncccgggngtcaccttaacattccnaananggggggtanttttaaatccnaaaaaanaancnaatnaaatggcnantggannccgcccggcattaaggcctgnaantttnaaatacntccataccngggngnttttaaaaaaattgttnccaaaaaaacncccttttatnnggcccccnncccnaaattgggncccngaaacccttggggggnanccggttccaaaanttntnngggngggaaaaannaanttaannnnnnnncccccntnnntnnanngggnccn

SEQ ID NO: 613 - DNA, 1385 bp, Homo Sapiens
  misc_feature (1)..(1): n is a, c, g, or t
  misc_feature (809)..(809): n is a, c, g, or t
  misc_feature (858)..(858): n is a, c, g, or t
  misc_feature (863)..(863): n is a, c, g, or t
  misc_feature (915)..(915): n is a, c, g, or t
  misc_feature (924)..(924): n is a, c, g, or t
  misc_feature (942)..(942): n is a, c, g, or t
  misc_feature (971)..(971): n is a, c, g, or t
  misc_feature (976)..(978): n is a, c, g, or t
  misc_feature (987)..(987): n is a, c, g, or t
  misc_feature (1007)..(1007): n is a, c, g, or t
  misc_feature (1020)..(1020): n is a, c, g, or t
  misc_feature (1027)..(1027): n is a, c, g, or t
  misc_feature (1029)..(1029): n is a, c, g, or t
  misc_feature (1035)..(1035): n is a, c, g, or t
  misc_feature (1037)..(1037): n is a, c, g, or t
  misc_feature (1044)..(1044): n is a, c, g, or t
  misc_feature (1059)..(1059): n is a, c, g, or t
  misc_feature (1062)..(1062): n is a, c, g, or t
  misc_feature (1070)..(1071): n is a, c, g, or t
  misc_feature (1074)..(1074): n is a, c, g, or t
  misc_feature (1085)..(1085): n is a, c, g, or t
  misc_feature (1088)..(1088): n is a, c, g, or t
  misc_feature (1093)..(1093): n is a, c, g, or t
  misc_feature (1095)..(1095): n is a, c, g, or t
  misc_feature (1101)..(1101): n is a, c, g, or t
  misc_feature (1106)..(1106): n is a, c, g, or t
  misc_feature (1115)..(1115): n is a, c, g, or t
  misc_feature (1119)..(1119): n is a, c, g, or t
  misc_feature (1131)..(1131): n is a, c, g, or t
  misc_feature (1134)..(1134): n is a, c, g, or t
  misc_feature (1136)..(1136): n is a, c, g, or t
  misc_feature (1140)..(1141): n is a, c, g, or t
  misc_feature (1143)..(1143): n is a, c, g, or t
  misc_feature (1155)..(1155): n is a, c, g, or t
  misc_feature (1159)..(1159): n is a, c, g, or t
  misc_feature (1161)..(1161): n is a, c, g, or t
  misc_feature (1164)..(1164): n is a, c, g, or t
  misc_feature (1167)..(1168): n is a, c, g, or t
  misc_feature (1172)..(1172): n is a, c, g, or t
  misc_feature (1174)..(1174): n is a, c, g, or t
  misc_feature (1180)..(1181): n is a, c, g, or t
  misc_feature (1183)..(1183): n is a, c, g, or t
  misc_feature (1188)..(1188): n is a, c, g, or t
  misc_feature (1195)..(1196): n is a, c, g, or t
  misc_feature (1198)..(1198): n is a, c, g, or t
  misc_feature (1203)..(1204): n is a, c, g, or t
  misc_feature (1209)..(1209): n is a, c, g, or t
  misc_feature (1215)..(1217): n is a, c, g, or t
  misc_feature (1222)..(1222): n is a, c, g, or t
  misc_feature (1229)..(1230): n is a, c, g, or t
  misc_feature (1234)..(1235): n is a, c, g, or t
  misc_feature (1240)..(1240): n is a, c, g, or t
  misc_feature (1246)..(1247): n is a, c, g, or t
  misc_feature (1250)..(1252): n is a, c, g, or t
  misc_feature (1254)..(1255): n is a, c, g, or t
  misc_feature (1257)..(1257): n is a, c, g, or t
  misc_feature (1259)..(1259): n is a, c, g, or t
  misc_feature (1264)..(1265): n is a, c, g, or t
  misc_feature (1269)..(1270): n is a, c, g, or t
  misc_feature (1273)..(1273): n is a, c, g, or t
  misc_feature (1278)..(1280): n is a, c, g, or t
  misc_feature (1282)..(1282): n is a, c, g, or t
  misc_feature (1284)..(1285): n is a, c, g, or t
  misc_feature (1287)..(1288): n is a, c, g, or t
  misc_feature (1292)..(1292): n is a, c, g, or t
  misc_feature (1295)..(1295): n is a, c, g, or t
  misc_feature (1300)..(1300): n is a, c, g, or t
  misc_feature (1302)..(1304): n is a, c, g, or t
  misc_feature (1307)..(1307): n is a, c, g, or t
  misc_feature (1311)..(1311): n is a, c, g, or t
  misc_feature (1316)..(1316): n is a, c, g, or t
  misc_feature (1319)..(1319): n is a, c, g, or t
  misc_feature (1324)..(1324): n is a, c, g, or t
  misc_feature (1328)..(1329): n is a, c, g, or t
  misc_feature (1333)..(1333): n is a, c, g, or t
  misc_feature (1337)..(1337): n is a, c, g, or t
  misc_feature (1340)..(1340): n is a, c, g, or t
  misc_feature (1347)..(1347): n is a, c, g, or t
  misc_feature (1349)..(1353): n is a, c, g, or t
  misc_feature (1357)..(1357): n is a, c, g, or t
  misc_feature (1361)..(1362): n is a, c, g, or t
  misc_feature (1372)..(1373): n is a, c, g, or t
  misc_feature (1377)..(1378): n is a, c, g, or t
  misc_feature (1381)..(1382): n is a, c, g, or t
  misc_feature (1384)..(1384): n is a, c, g, or t
nagagaaattactatgagaggatcgcatcaccatcaccatcacggatcctatttaggtgacactatagaatcgtcgacccacgcgtccggtttccagtgtgagtgcccacctggctaccacctcagtgagcacacccgcatctgtgaggatattgacgaatgctccacacactccagcatctgtggccctggcacctgctacaacaccctggggaactacacctgtgtctgccctgcagagtacctccaagtcaatggtggcaacaactgcatggatatgaggaagagtgtctgcttccggcactataacggcacatgtcaaaatgagctggccttcaacgtgacccggaaaatgtgttgctgctcctacaacattggccaggcctggaatagaccctgtgaggcctgccccactcccatcagtcctgactaccagatcctgtgtggaaatcaggccccgggattcctcactgacatccacacggggaagccccttgacattgatgagtgtggggagatccccgccatctgtgccaatggcatctgcataaaccagatcgggagtttccgctgcgagtgccccgcaggcttcaactacaacagcatcctgctggcttgtgaagatgtcgatgagtgtggcagcagggagagtccctgccagcagaatgctgactgcatcaacatccccggtagctaccgctgcaagtgcacccgagggtacaaactgtcgccaggcggggcttgtgtgggacggaatgagtgtcgggagatcccgaatgtctgtagccatggtgactgcatggacacanaaggcagctacatgtgtctgtgtcaccgtggaattccaggcctctgcanaccanaccctgtgcatggacattgacgaatgtgaccggcagccttgtggaaatgggnacctgcaanaacatcattggctcctanaactgcctctgcttccctggctttgtggngacannnaatgggganttgggggaattttgataaangtactaccctggnggggcangngtgccnanttggccnttgcctcaaaaaagntgntccttccnntgnctttgccaganggnttttnanctcaanctgangggaaaaantggntggaaaccaatnaangnctcnncntttgaaagaacngccnanccnggnntttncnaaaacnncnagggntcttccnntnatttnnccccnggtttnnnggggnaaaaggnncctnnttttnattccnnaannntnnananacccnncctnnccnttttnnncntnnannaaanccnggaantnnnggncccnccccnggnttttncccnnaaangggnccnttttttnannnnnaaantttnnttcccttttnngggnnaanncng

SEQ ID NO: 614 - DNA, 1340 bp, Homo Sapiens
  misc_feature (856)..(856): n is a, c, g, or t
  misc_feature (902)..(902): n is a, c, g, or t
  misc_feature (917)..(917): n is a, c, g, or t
  misc_feature (922)..(922): n is a, c, g, or t
  misc_feature (925)..(925): n is a, c, g, or t
  misc_feature (931)..(931): n is a, c, g, or t
  misc_feature (942)..(942): n is a, c, g, or t
  misc_feature (1006)..(1006): n is a, c, g, or t
  misc_feature (1013)..(1013): n is a, c, g, or t
  misc_feature (1021)..(1021): n is a, c, g, or t
  misc_feature (1023)..(1023): n is a, c, g, or t
  misc_feature (1036)..(1037): n is a, c, g, or t
  misc_feature (1040)..(1040): n is a, c, g, or t
  misc_feature (1046)..(1046): n is a, c, g, or t
  misc_feature (1054)..(1054): n is a, c, g, or t
  misc_feature (1062)..(1063): n is a, c, g, or t
  misc_feature (1074)..(1074): n is a, c, g, or t
  misc_feature (1079)..(1079): n is a, c, g, or t
  misc_feature (1085)..(1085): n is a, c, g, or t
  misc_feature (1099)..(1099): n is a, c, g, or t
  misc_feature (1105)..(1105): n is a, c, g, or t
  misc_feature (1111)..(1111): n is a, c, g, or t
  misc_feature (1115)..(1115): n is a, c, g, or t
  misc_feature (1119)..(1121): n is a, c, g, or t
  misc_feature (1127)..(1127): n is a, c, g, or t
  misc_feature (1129)..(1129): n is a, c, g, or t
  misc_feature (1138)..(1138): n is a, c, g, or t
  misc_feature (1142)..(1142): n is a, c, g, or t
  misc_feature (1149)..(1149): n is a, c, g, or t
  misc_feature (1154)..(1154): n is a, c, g, or t
  misc_feature (1164)..(1164): n is a, c, g, or t
  misc_feature (1166)..(1167): n is a, c, g, or t
  misc_feature (1172)..(1172): n is a, c, g, or t
  misc_feature (1178)..(1179): n is a, c, g, or t
  misc_feature (1181)..(1181): n is a, c, g, or t
  misc_feature (1189)..(1190): n is a, c, g, or t
  misc_feature (1200)..(1200): n is a, c, g, or t
  misc_feature (1202)..(1202): n is a, c, g, or t
  misc_feature (1209)..(1209): n is a, c, g, or t
  misc_feature (1213)..(1213): n is a, c, g, or t
  misc_feature (1234)..(1234): n is a, c, g, or t
  misc_feature (1243)..(1243): n is a, c, g, or t
  misc_feature (1245)..(1245): n is a, c, g, or t
  misc_feature (1253)..(1253): n is a, c, g, or t
  misc_feature (1255)..(1257): n is a, c, g, or t
  misc_feature (1271)..(1271): n is a, c, g, or t
  misc_feature (1276)..(1276): n is a, c, g, or t
  misc_feature (1279)..(1279): n is a, c, g, or t
  misc_feature (1282)..(1282): n is a, c, g, or t
  misc_feature (1289)..(1289): n is a, c, g, or t
  misc_feature (1294)..(1294): n is a, c, g, or t
  misc_feature (1297)..(1297): n is a, c, g, or t
  misc_feature (1306)..(1306): n is a, c, g, or t
  misc_feature (1309)..(1310): n is a, c, g, or t
  misc_feature (1312)..(1312): n is a, c, g, or t
  misc_feature (1329)..(1329): n is a, c, g, or t
  misc_feature (1339)..(1340): n is a, c, g, or t
tagagaaaattactatgagaggatcgcatcaccatcaccattcacggatcctatttaggtgacactatagaatcgtcgacccacgcgtccgagagcattgtagaccaaggagccatggataggagaagtatgggtgaaacagaaagtggagatgctttccttgacctgaagaagcctcctgcctccaaatgcccccatcgctatacaaaagaagaactcttggatataaaagaactcccccattccaaacagaggccttcatgcctttctgaaaaatatgacagtgatggtgtctgggaccctgagaagtggcatgcctctctctacccagcttcagggcggagctcaccagtggaaagtctgaagaaagagttggatacagaccggccttccctggtgcgcaggatagtagatccacgagagcgtgtgaaagaagatgacttagatgttgttctcagccctcagagacggagctttggagggggctgccacgtgacagccgctgttagctcccggcgctcaggaagtccattagagaaagatagtgatgggcttcgtctgcttggtggacgtaggattggcagtgggaggataatctctgcccggacctttgagaaggatcaccgtcttagcgataaggacctgcgggacttgagagacagagaccgagagagggacttcaaggacaagcgtttcaggagagagtttggagatagtaagcgtgtctttggtgagcgtagaagaaatgattcttacacagaagaagaaccagagtggttctctgctggacccacaagtcagtctgaaaccatcgaactgactggctttgatgataagatactagaagaagatcacnaagggagaaaaagaacaaggcgacggacagcctctgtgaaggaagntatagtaaagtgcantggangantggccnaaaagatgaantggaggtcatccttgcacaggagcctgcggctgatcaggaagtgccaagggatgctgtcttgcntgaacantccccagnanactttgactttannganttcttnaccttganaagggccnngcttggcttcnaaganaaaaangtttggaaaaaggncatccntgccantcgntcannnggggtncntacccggcnaatnggaaccnatccncatcttgggncnnccccntgaaanntnaaaaattnnggggtgggananccccccncccnggaaaaattggggaatttttnttctttccntnggaaaccngnnnaaaaagggattttnaaggnccnaanccagggntttanccnttttccccnttnncnaaaaaaataaaaaaccntttggggggnn

SEQ ID NO: 615 - DNA, 1200 bp, Homo Sapiens
  misc_feature (1)..(1): n is a, c, g, or t
  misc_feature (108)..(108): n is a, c, g, or t
  misc_feature (148)..(148): n is a, c, g, or t
  misc_feature (187)..(187): n is a, c, g, or t
  misc_feature (205)..(206): n is a, c, g, or t
  misc_feature (221)..(221): n is a, c, g, or t
  misc_feature (224)..(224): n is a, c, g, or t
  misc_feature (226)..(226): n is a, c, g, or t
  misc_feature (229)..(230): n is a, c, g, or t
  misc_feature (239)..(239): n is a, c, g, or t
  misc_feature (246)..(247): n is a, c, g, or t
  misc_feature (256)..(258): n is a, c, g, or t
  misc_feature (263)..(263): n is a, c, g, or t
  misc_feature (266)..(266): n is a, c, g, or t
  misc_feature (270)..(270): n is a, c, g, or t
  misc_feature (273)..(273): n is a, c, g, or t
  misc_feature (279)..(279): n is a, c, g, or t
  misc_feature (287)..(288): n is a, c, g, or t
  misc_feature (290)..(290): n is a, c, g, or t
  misc_feature (293)..(295): n is a, c, g, or t
  misc_feature (303)..(305): n is a, c, g, or t
  misc_feature (309)..(309): n is a, c, g, or t
  misc_feature (311)..(311): n is a, c, g, or t
  misc_feature (318)..(318): n is a, c, g, or t
  misc_feature (326)..(327): n is a, c, g, or t
  misc_feature (341)..(344): n is a, c, g, or t
  misc_feature (351)..(352): n is a, c, g, or t
  misc_feature (354)..(354): n is a, c, g, or t
  misc_feature (356)..(356): n is a, c, g, or t
  misc_feature (358)..(358): n is a, c, g, or t
  misc_feature (362)..(362): n is a, c, g, or t
  misc_feature (364)..(364): n is a, c, g, or t
  misc_feature (368)..(370): n is a, c, g, or t
  misc_feature (376)..(377): n is a, c, g, or t
  misc_feature (379)..(379): n is a, c, g, or t
  misc_feature (381)..(381): n is a, c, g, or t
  misc_feature (383)..(383): n is a, c, g, or t
  misc_feature (387)..(387): n is a, c, g, or t
  misc_feature (397)..(397): n is a, c, g, or t
  misc_feature (401)..(401): n is a, c, g, or t
  misc_feature (408)..(408): n is a, c, g, or t
  misc_feature (413)..(415): n is a, c, g, or t
  misc_feature (431)..(433): n is a, c, g, or t
  misc_feature (436)..(436): n is a, c, g, or t
  misc_feature (442)..(443): n is a, c, g, or t
  misc_feature (446)..(446): n is a, c, g, or t
  misc_feature (450)..(451): n is a, c, g, or t
  misc_feature (454)..(454): n is a, c, g, or t
  misc_feature (457)..(458): n is a, c, g, or t
  misc_feature (461)..(461): n is a, c, g, or t
  misc_feature (464)..(467): n is a, c, g, or t
  misc_feature (471)..(471): n is a, c, g, or t
  misc_feature (473)..(473): n is a, c, g, or t
  misc_feature (475)..(476): n is a, c, g, or t
  misc_feature (485)..(485): n is a, c, g, or t
  misc_feature (489)..(489): n is a, c, g, or t
  misc_feature (493)..(493): n is a, c, g, or t
  misc_feature (508)..(508): n is a, c, g, or t
  misc_feature (512)..(512): n is a, c, g, or t
  misc_feature (516)..(516): n is a, c, g, or t
  misc_feature (518)..(519): n is a, c, g, or t
  misc_feature (528)..(528): n is a, c, g, or t
  misc_feature (530)..(530): n is a, c, g, or t
  misc_feature (533)..(533): n is a, c, g, or t
  misc_feature (538)..(538): n is a, c, g, or t
  misc_feature (546)..(546): n is a, c, g, or t
  misc_feature (554)..(554): n is a, c, g, or t
  misc_feature (556)..(556): n is a, c, g, or t
  misc_feature (558)..(558): n is a, c, g, or t
  misc_feature (571)..(571): n is a, c, g, or t
  misc_feature (579)..(579): n is a, c, g, or t
  misc_feature (583)..(583): n is a, c, g, or t
  misc_feature (585)..(585): n is a, c, g, or t
  misc_feature (590)..(590): n is a, c, g, or t
  misc_feature (596)..(596): n is a, c, g, or t
  misc_feature (598)..(598): n is a, c, g, or t
  misc_feature (603)..(603): n is a, c, g, or t
  misc_feature (606)..(606): n is a, c, g, or t
  misc_feature (610)..(610): n is a, c, g, or t
  misc_feature (613)..(614): n is a, c, g, or t
  misc_feature (617)..(617): n is a, c, g, or t
  misc_feature (623)..(624): n is a, c, g, or t
  misc_feature (629)..(630): n is a, c, g, or t
  misc_feature (638)..(638): n is a, c, g, or t
  misc_feature (643)..(643): n is a, c, g, or t
  misc_feature (649)..(650): n is a, c, g, or t
  misc_feature (654)..(654): n is a, c, g, or t
  misc_feature (663)..(663): n is a, c, g, or t
  misc_feature (668)..(668): n is a, c, g, or t
  misc_feature (672)..(672): n is a, c, g, or t
  misc_feature (674)..(674): n is a, c, g, or t
  misc_feature (680)..(680): n is a, c, g, or t
  misc_feature (686)..(686): n is a, c, g, or t
  misc_feature (690)..(690): n is a, c, g, or t
  misc_feature (695)..(695): n is a, c, g, or t
  misc_feature (699)..(701): n is a, c, g, or t
  misc_feature (704)..(704): n is a, c, g, or t
  misc_feature (707)..(709): n is a, c, g, or t
  misc_feature (711)..(711): n is a, c, g, or t
  misc_feature (713)..(713): n is a, c, g, or t
  misc_feature (717)..(718): n is a, c, g, or t
  misc_feature (720)..(722): n is a, c, g, or t
  misc_feature (724)..(724): n is a, c, g, or t
  misc_feature (729)..(729): n is a, c, g, or t
  misc_feature (737)..(737): n is a, c, g, or t
  misc_feature (742)..(743): n is a, c, g, or t
  misc_feature (747)..(747): n is a, c, g, or t
  misc_feature (749)..(749): n is a, c, g, or t
  misc_feature (756)..(756): n is a, c, g, or t
  misc_feature (765)..(765): n is a, c, g, or t
  misc_feature (773)..(774): n is a, c, g, or t
  misc_feature (777)..(777): n is a, c, g, or t
  misc_feature (779)..(779): n is a, c, g, or t
  misc_feature (781)..(781): n is a, c, g, or t
  misc_feature (783)..(783): n is a, c, g, or t
  misc_feature (787)..(787): n is a, c, g, or t
  misc_feature (792)..(792): n is a, c, g, or t
  misc_feature (794)..(794): n is a, c, g, or t
  misc_feature (796)..(796): n is a, c, g, or t
  misc_feature (801)..(802): n is a, c, g, or t
  misc_feature (806)..(806): n is a, c, g, or t
  misc_feature (808)..(808): n is a, c, g, or t
  misc_feature (814)..(815): n is a, c, g, or t
  misc_feature (819)..(820): n is a, c, g, or t
  misc_feature (824)..(824): n is a, c, g, or t
  misc_feature (831)..(832): n is a, c, g, or t
  misc_feature (834)..(834): n is a, c, g, or t
  misc_feature (838)..(839): n is a, c, g, or t
  misc_feature (841)..(842): n is a, c, g, or t
  misc_feature (845)..(845): n is a, c, g, or t
  misc_feature (853)..(853): n is a, c, g, or t
  misc_feature (861)..(861): n is a, c, g, or t
  misc_feature (865)..(865): n is a, c, g, or t
  misc_feature (868)..(868): n is a, c, g, or t
  misc_feature (870)..(870): n is a, c, g, or t
  misc_feature (876)..(876): n is a, c, g, or t
  misc_feature (879)..(881): n is a, c, g, or t
  misc_feature (883)..(883): n is a, c, g, or t
  misc_feature (892)..(894): n is a, c, g, or t
  misc_feature (898)..(899): n is a, c, g, or t
  misc_feature (905)..(905): n is a, c, g, or t
  misc_feature (912)..(913): n is a, c, g, or t
  misc_feature (917)..(917): n is a, c, g, or t
  misc_feature (920)..(922): n is a, c, g, or t
  misc_feature (927)..(927): n is a, c, g, or t
  misc_feature (932)..(932): n is a, c, g, or t
  misc_feature (935)..(936): n is a, c, g, or t
  misc_feature (938)..(938): n is a, c, g, or t
  misc_feature (943)..(943): n is a, c, g, or t
  misc_feature (948)..(948): n is a, c, g, or t
  misc_feature (957)..(957): n is a, c, g, or t
  misc_feature (959)..(959): n is a, c, g, or t
  misc_feature (967)..(967): n is a, c, g, or t
  misc_feature (970)..(971): n is a, c, g, or t
  misc_feature (975)..(975): n is a, c, g, or t
  misc_feature (977)..(977): n is a, c, g, or t
  misc_feature (983)..(984): n is a, c, g, or t
  misc_feature (986)..(986): n is a, c, g, or t
  misc_feature (992)..(992): n is a, c, g, or t
  misc_feature (996)..(997): n is a, c, g, or t
  misc_feature (1000)..(1000): n is a, c, g, or t
  misc_feature (1003)..(1003): n is a, c, g, or t
  misc_feature (1008)..(1008): n is a, c, g, or t
  misc_feature (1012)..(1012): n is a, c, g, or t
  misc_feature (1017)..(1017): n is a, c, g, or t
  misc_feature (1019)..(1021): n is a, c, g, or t
  misc_feature (1023)..(1023): n is a, c, g, or t
  misc_feature (1027)..(1027): n is a, c, g, or t
  misc_feature (1032)..(1032): n is a, c, g, or t
  misc_feature (1037)..(1038): n is a, c, g, or t
  misc_feature (1043)..(1044): n is a, c, g, or t
  misc_feature (1046)..(1046): n is a, c, g, or t
  misc_feature (1051)..(1051): n is a, c, g, or t
  misc_feature (1054)..(1054): n is a, c, g, or t
  misc_feature (1061)..(1061): n is a, c, g, or t
  misc_feature (1063)..(1063): n is a, c, g, or t
  misc_feature (1066)..(1066): n is a, c, g, or t
  misc_feature (1070)..(1070): n is a, c, g, or t
  misc_feature (1072)..(1072): n is a, c, g, or t
  misc_feature (1082)..(1083): n is a, c, g, or t
  misc_feature (1089)..(1090): n is a, c, g, or t
  misc_feature (1093)..(1093): n is a, c, g, or t
  misc_feature (1095)..(1095): n is a, c, g, or t
  misc_feature (1100)..(1100): n is a, c, g, or t
  misc_feature (1105)..(1105): n is a, c, g, or t
  misc_feature (1108)..(1108): n is a, c, g, or t
  misc_feature (1111)..(1111): n is a, c, g, or t
  misc_feature (1113)..(1114): n is a, c, g, or t
  misc_feature (1119)..(1119): n is a, c, g, or t
  misc_feature (1125)..(1125): n is a, c, g, or t
  misc_feature (1127)..(1130): n is a, c, g, or t
  misc_feature (1132)..(1132): n is a, c, g, or t
  misc_feature (1137)..(1137): n is a, c, g, or t
  misc_feature (1147)..(1147): n is a, c, g, or t
  misc_feature (1149)..(1149): n is a, c, g, or t
  misc_feature (1155)..(1156): n is a, c, g, or t
  misc_feature (1159)..(1160): n is a, c, g, or t
  misc_feature (1177)..(1177): n is a, c, g, or t
  misc_feature (1186)..(1187): n is a, c, g, or t
  misc_feature (1190)..(1190): n is a, c, g, or t
  misc_feature (1192)..(1192): n is a, c, g, or t
  misc_feature (1197)..(1197): n is a, c, g, or t
  misc_feature (1200)..(1200): n is a, c, g, or t
ntagagagattactatgagaggatcgcatcaccatcaccatcacggatcctatttaggtgacactatagaatcgtcgacccacgcgtccgagcggctgctggacgaanagcgggcgccgggagctccgagagcgcggccgggcgaggngggagcgcgggcgctggcctggccgcgggcgggggccgncgccgcgcccctgccccnntgtcgcgagccgggncgngncgnngagcgcganggccggnntcccggagnnngcacntcngttnaanatctgnattccaannanggnnnacgcacannnatcngnaaccctntgtacaannttttatcctcctgnnnncatatannancntngtgngncagnnntttccnncncntngaancacattattnttcnctaacgnagtcnnnaagcagcacatttttnnnacntaatannctntaannccngannaanatnnnntgantncnntcctgatgnatgncctntgcacctcaaaattnattngaancnntcttctctntnctnaaacntcataaantgattacncngnaatgctcgacctngcatgaanaaanantaacntctacngnaaaanttngacnttnnccnattgannaatannctctgacnttctngtaatnntaantatttaccncattnccangnaaaatncaattngttnactgnattnnnctnccnnngnantagnncnnntnattcnttattcanccctnntgananaggatcncttttaagnagggtacnnttntnanantaancctananancttgnntatnanccattnntcanngaanttgttanntnaatnnannaanacctaaanaattcccnaatnacncnttattnggnnnantaaaaaaannncccnntccaanttaactnncacnccnnnatttntcacncanncnctttncttanaaattttantngctgcatnaannaaanantacaanntnactagnaagnnccnctnccatngacncttantnnntncccntttcnacttnncaaanngnaaatnatntaatccncntanacantncctatataannattttnnaancntttcntcttnaanaanannataanaataancnnnncnatttnttatatttcnantatctnntgnnaatgattcacactattntctttacannacntntcaantcn

SEQ ID NO: 616 - DNA, 1200 bp, Homo Sapiens
  misc_feature (90)..(90): n is a, c, g, or t
  misc_feature (95)..(95): n is a, c, g, or t
  misc_feature (112)..(112): n is a, c, g, or t
  misc_feature (117)..(117): n is a, c, g, or t
  misc_feature (120)..(120): n is a, c, g, or t
  misc_feature (123)..(123): n is a, c, g, or t
  misc_feature (128)..(129): n is a, c, g, or t
  misc_feature (131)..(131): n is a, c, g, or t
  misc_feature (137)..(137): n is a, c, g, or t
  misc_feature (182)..(182): n is a, c, g, or t
  misc_feature (211)..(211): n is a, c, g, or t
  misc_feature (232)..(232): n is a, c, g, or t
  misc_feature (240)..(241): n is a, c, g, or t
  misc_feature (296)..(296): n is a, c, g, or t
  misc_feature (359)..(359): n is a, c, g, or t
  misc_feature (365)..(365): n is a, c, g, or t
  misc_feature (369)..(369): n is a, c, g, or t
  misc_feature (377)..(377): n is a, c, g, or t
  misc_feature (381)..(381): n is a, c, g, or t
  misc_feature (395)..(395): n is a, c, g, or t
  misc_feature (406)..(406): n is a, c, g, or t
  misc_feature (408)..(408): n is a, c, g, or t
  misc_feature (410)..(410): n is a, c, g, or t
  misc_feature (425)..(425): n is a, c, g, or t
  misc_feature (427)..(427): n is a, c, g, or t
  misc_feature (443)..(443): n is a, c, g, or t
  misc_feature (445)..(445): n is a, c, g, or t
  misc_feature (454)..(454): n is a, c, g, or t
  misc_feature (462)..(462): n is a, c, g, or t
  misc_feature (465)..(465): n is a, c, g, or t
  misc_feature (471)..(471): n is a, c, g, or t
  misc_feature (475)..(477): n is a, c, g, or t
  misc_feature (480)..(480): n is a, c, g, or t
  misc_feature (485)..(485): n is a, c, g, or t
  misc_feature (506)..(507): n is a, c, g, or t
  misc_feature (513)..(513): n is a, c, g, or t
  misc_feature (517)..(518): n is a, c, g, or t
  misc_feature (520)..(520): n is a, c, g, or t
  misc_feature (535)..(535): n is a, c, g, or t
  misc_feature (539)..(539): n is a, c, g, or t
  misc_feature (542)..(542): n is a, c, g, or t
  misc_feature (547)..(547): n is a, c, g, or t
  misc_feature (549)..(549): n is a, c, g, or t
  misc_feature (553)..(553): n is a, c, g, or t
  misc_feature (555)..(555): n is a, c, g, or t
  misc_feature (569)..(569): n is a, c, g, or t
  misc_feature (573)..(573): n is a, c, g, or t
  misc_feature (578)..(578): n is a, c, g, or t
  misc_feature (591)..(591): n is a, c, g, or t
  misc_feature (600)..(600): n is a, c, g, or t
  misc_feature (616)..(617): n is a, c, g, or t
  misc_feature (628)..(628): n is a, c, g, or t
  misc_feature (659)..(660): n is a, c, g, or t
  misc_feature (662)..(662): n is a, c, g, or t
  misc_feature (670)..(671): n is a, c, g, or t
  misc_feature (701)..(701): n is a, c, g, or t
  misc_feature (708)..(708): n is a, c, g, or t
  misc_feature (716)..(716): n is a, c, g, or t
  misc_feature (720)..(720): n is a, c, g, or t
  misc_feature (723)..(723): n is a, c, g, or t
  misc_feature (731)..(731): n is a, c, g, or t
  misc_feature (737)..(737): n is a, c, g, or t
  misc_feature (740)..(740): n is a, c, g, or t
  misc_feature (753)..(754): n is a, c, g, or t
  misc_feature (763)..(763): n is a, c, g, or t
  misc_feature (765)..(765): n is a, c, g, or t
  misc_feature (773)..(773): n is a, c, g, or t
  misc_feature (781)..(781): n is a, c, g, or t
  misc_feature (789)..(790): n is a, c, g, or t
  misc_feature (794)..(794): n is a, c, g, or t
  misc_feature (814)..(814): n is a, c, g, or t
  misc_feature (819)..(819): n is a, c, g, or t
  misc_feature (823)..(825): n is a, c, g, or t
  misc_feature (839)..(839): n is a, c, g, or t
  misc_feature (845)..(845): n is a, c, g, or t
  misc_feature (866)..(866): n is a, c, g, or t
  misc_feature (868)..(868): n is a, c, g, or t
  misc_feature (881)..(881): n is a, c, g, or t
  misc_feature (894)..(895): n is a, c, g, or t
  misc_feature (909)..(909): n is a, c, g, or t
  misc_feature (918)..(918): n is a, c, g, or t
  misc_feature (932)..(932): n is a, c, g, or t
  misc_feature (934)..(934): n is a, c, g, or t
  misc_feature (940)..(940): n is a, c, g, or t
  misc_feature (944)..(944): n is a, c, g, or t
  misc_feature (949)..(949): n is a, c, g, or t
  misc_feature (952)..(954): n is a, c, g, or t
  misc_feature (963)..(963): n is a, c, g, or t
  misc_feature (969)..(970): n is a, c, g, or t
  misc_feature (974)..(974): n is a, c, g, or t
  misc_feature (982)..(982): n is a, c, g, or t
  misc_feature (988)..(988): n is a, c, g, or t
  misc_feature (1009)..(1009): n is a, c, g, or t
  misc_feature (1013)..(1014): n is a, c, g, or t
  misc_feature (1023)..(1023): n is a, c, g, or t
  misc_feature (1025)..(1025): n is a, c, g, or t
  misc_feature (1029)..(1029): n is a, c, g, or t
  misc_feature (1038)..(1038): n is a, c, g, or t
  misc_feature (1048)..(1048): n is a, c, g, or t
  misc_feature (1053)..(1053): n is a, c, g, or t
  misc_feature (1064)..(1065): n is a, c, g, or t
  misc_feature (1071)..(1071): n is a, c, g, or t
  misc_feature (1074)..(1074): n is a, c, g, or t
  misc_feature (1080)..(1080): n is a, c, g, or t
  misc_feature (1083)..(1084): n is a, c, g, or t
  misc_feature (1093)..(1093): n is a, c, g, or t
  misc_feature (1095)..(1095): n is a, c, g, or t
  misc_feature (1104)..(1105): n is a, c, g, or t
  misc_feature (1109)..(1109): n is a, c, g, or t
  misc_feature (1111)..(1111): n is a, c, g, or t
  misc_feature (1119)..(1119): n is a, c, g, or t
  misc_feature (1121)..(1121): n is a, c, g, or t
  misc_feature (1129)..(1130): n is a, c, g, or t
  misc_feature (1135)..(1137): n is a, c, g, or t
  misc_feature (1141)..(1145): n is a, c, g, or t
  misc_feature (1151)..(1152): n is a, c, g, or t
  misc_feature (1156)..(1156): n is a, c, g, or t
  misc_feature (1158)..(1158): n is a, c, g, or t
  misc_feature (1164)..(1164): n is a, c, g, or t
  misc_feature (1166)..(1166): n is a, c, g, or t
  misc_feature (1171)..(1172): n is a, c, g, or t
  misc_feature (1182)..(1182): n is a, c, g, or t
  misc_feature (1189)..(1191): n is a, c, g, or t
  misc_feature (1197)..(1200): n is a, c, g, or t
tagagaaattactatgagaggatcgcatcaccatcaccatcacggatcctatttaggtgacactatagaatcgtcgacccacgcgtccgnttttncagcggaaccttcttgntgggnatntanagctnnanggactncagcgcgtagatctccgaggaccatgaggatcctgtgatatgtangccgtgatgctgagcctgtggcacttcanccccctgcaagcacgggcacntctcgtgnnaggggatcctcattgcaaaccaccaggcaagcgctgtctggttgctggaatgtcngaggaggtgaggtgcgcctgagccctgactgccatgaacgcccacctaccaatactctggagncctgcntgtngcaccggntggntggctggtcattanggaccgtccantntnccctcattcaccttntngattacagccatgccncntagcgacgnatcccccnagncatggnttgnnntgnttttnaatgaaaagacctgaactgtnntaaaantgcnnantgctggccttgcccnatgntgnaaacngncgtncnctccctatactgantcgnattancctaaattacctnatcttgtantcctgttgataaatcnnataataacctnaaaactcaatctggatttgttcagaacgatnngntgcccccnncagttttttattgctgagaatccaagctancttggcnaagatttntggnagntaaggatnctaaantgnagaaaaaaatatnngaatatacncncgttgatntatcccantggcatcnnaaanaacattttgaagcatttcantcacntgcnnnatgtaacatataancaaacngttcatgtgaaatattacggngntttttaaaaaccntaaaaaaaaaaannacaagttttatccnggtttttantcacattttttgcncncctgangaangctcntcnnnaaatttccnaatggnnaatnaaaaaacngtaaantgggtgaaaatgggaaaaatntttnnccctttttnanaccntttttccangaacaaaatnaaaanttttttcttcnntctggnaanaaaaancannaaaaatttncnggaattttnnaaanantatatttncnaaaaaatnnggggnnnttannnnnaaaaanntggncnaatttncntaaannggttttattnaaaaaannntttttnnnn

SEQ ID NO: 617 - DNA, 1200 bp, Homo Sapiens
  misc_feature (852)..(852): n is a, c, g, or t
  misc_feature (890)..(890): n is a, c, g, or t
  misc_feature (914)..(914): n is a, c, g, or t
  misc_feature (940)..(940): n is a, c, g, or t
  misc_feature (943)..(943): n is a, c, g, or t
  misc_feature (964)..(964): n is a, c, g, or t
  misc_feature (970)..(970): n is a, c, g, or t
  misc_feature (989)..(990): n is a, c, g, or t
  misc_feature (1010)..(1010): n is a, c, g, or t
  misc_feature (1014)..(1014): n is a, c, g, or t
  misc_feature (1025)..(1025): n is a, c, g, or t
  misc_feature (1029)..(1029): n is a, c, g, or t
  misc_feature (1041)..(1041): n is a, c, g, or t
  misc_feature (1059)..(1059): n is a, c, g, or t
  misc_feature (1064)..(1064): n is a, c, g, or t
  misc_feature (1067)..(1067): n is a, c, g, or t
  misc_feature (1074)..(1074): n is a, c, g, or t
  misc_feature (1083)..(1083): n is a, c, g, or t
  misc_feature (1091)..(1092): n is a, c, g, or t
  misc_feature (1094)..(1095): n is a, c, g, or t
  misc_feature (1107)..(1107): n is a, c, g, or t
  misc_feature (1110)..(1110): n is a, c, g, or t
  misc_feature (1120)..(1120): n is a, c, g, or t
  misc_feature (1131)..(1132): n is a, c, g, or t
  misc_feature (1148)..(1148): n is a, c, g, or t
  misc_feature (1152)..(1153): n is a, c, g, or t
  misc_feature (1155)..(1155): n is a, c, g, or t
  misc_feature (1157)..(1157): n is a, c, g, or t
  misc_feature (1176)..(1176): n is a, c, g, or t
  misc_feature (1180)..(1180): n is a, c, g, or t
  misc_feature (1184)..(1184): n is a, c, g, or t
  misc_feature (1191)..(1191): n is a, c, g, or t
  misc_feature (1198)..(1199): n is a, c, g, or t
agagaaattactatgagaggatcgcatcaccatcaccatcacggatcctatttaggtgacactatagaatcgtcgacccacgcgtccgaaccaacaaacaaatgtaagactacaaaatcgttcaagagcaattctaatataatttacatatgttcacgcaaaatatgcttaggctgtcaaattagcacaacaaagaatgtgtttcactatcttttctaggctaatttgtcttgagctgttgtctatagagcagtttacagacttgtgtcttgtatcattttccagtgccagggttctgaaattcattcagaacctgttagattaaagctgcaccctgtgattatttgaaaagaattagcttgagagtaatgtcactatatttgagttcttagagaagtatgagtggaacttgagtacagttgaattattaaatatgcaagttagaaattaagtctactgaaaaatttacattttgagtcaggttttgtgtcagtactttagcagtttttgagaatgtgtttgatatcacagtgtttgtaaattctatgaaaaatgcattttccaaacaacttatacatgctttttatgactatgcctaatgtaaagaaaatgtattacattctgtatgtacaaagattaaaaatcaacctcttttttgtgctttaaaatgactttgggattaaaaaagcatatttcccaatcattgtcttcattccactacaaagtcacctcacagcatcttgctccactcggcatctctgtgaaagcaacatgaaatgaactgtagtaggtgtgtagtttggggaagtcaaatggccattttatgtatgtgcatttggtatcatgggccgnggaacagaatatatgttggacctctgaaaagttgtaanggggccaattctaagtattcttcncggcagccagaagttaatggtggtancanctgaggtatggttgttggacnaggccnattttttttttttttaccnnggaacatggaacccaccacnaacntttttaaaatnaaangggaaaattggnaaaaagtttttacctttnaaaanttnaaggggntttttgagngggaaaanntnnaaaaaaaactanttngccaccgggntttcccaaaannaaaaaaaaaccccccngggnntngnacccgggggggggaacctnaaancccnatttccncctttcnna

SEQ ID NO: 618 - DNA, 1200 bp, Homo Sapiens
  misc_feature (2)..(2): n is a, c, g, or t
  misc_feature (7)..(7): n is a, c, g, or t
  misc_feature (11)..(11): n is a, c, g, or t
  misc_feature (16)..(16): n is a, c, g, or t
  misc_feature (86)..(86): n is a, c, g, or t
  misc_feature (921)..(921): n is a, c, g, or t
  misc_feature (926)..(926): n is a, c, g, or t
  misc_feature (934)..(934): n is a, c, g, or t
  misc_feature (960)..(960): n is a, c, g, or t
  misc_feature (999)..(999): n is a, c, g, or t
  misc_feature (1002)..(1002): n is a, c, g, or t
  misc_feature (1006)..(1006): n is a, c, g, or t
  misc_feature (1018)..(1018): n is a, c, g, or t
  misc_feature (1030)..(1030): n is a, c, g, or t
  misc_feature (1034)..(1034): n is a, c, g, or t
  misc_feature (1040)..(1040): n is a, c, g, or t
  misc_feature (1051)..(1051): n is a, c, g, or t
  misc_feature (1065)..(1065): n is a, c, g, or t
  misc_feature (1068)..(1068): n is a, c, g, or t
  misc_feature (1070)..(1070): n is a, c, g, or t
  misc_feature (1072)..(1072): n is a, c, g, or t
  misc_feature (1075)..(1075): n is a, c, g, or t
  misc_feature (1077)..(1078): n is a, c, g, or t
  misc_feature (1099)..(1099): n is a, c, g, or t
  misc_feature (1101)..(1101): n is a, c, g, or t
  misc_feature (1103)..(1104): n is a, c, g, or t
  misc_feature (1111)..(1111): n is a, c, g, or t
  misc_feature (1122)..(1125): n is a, c, g, or t
  misc_feature (1129)..(1129): n is a, c, g, or t
  misc_feature (1136)..(1137): n is a, c, g, or t
  misc_feature (1144)..(1144): n is a, c, g, or t
  misc_feature (1149)..(1149): n is a, c, g, or t
  misc_feature (1151)..(1184): n is a, c, g, or t
  misc_feature (1189)..(1189): n is a, c, g, or t
  misc_feature (1192)..(1192): n is a, c, g, or t
  misc_feature (1197)..(1197): n is a, c, g, or t
tngaggnaatnactangagaggatgcatcaccatcaccatcacggatcctatttaggtgacactatagaatcgtcgacccacgcgntccggaacaagaacgcgctcctccgcctgctgcccgggctggtggagacctttggcgacttggcctttggcgacatcttcctccacctgctcacgggcaaccttgcgctgctggccgacgaatttgcccttgaggacttctgcagcagcctcttcgatggcttcttcctcaccgcctctccaaggaaggagaacgtgcaccggcacgcgctgcggctcctcattcacctgcaccccagggtggccccatctaagctggaggcgttgcagaaggccctggagcctacaggccagagcggagaggcagtgaaggagctttactcccagctcggcgagaagctggaacagctggatcaccggaagcccagcccggcacaggctgcggagacgccggccctggagctgcccctccccagcgtgcccgcccctgccccgctctgagggccctccagacctgctcgggtgctggggccatgccgagtcgcggccctgctcagccggaagaggctcccggacctggatgtacagggcagtctctcttcccggggctatggctgggcctgtcctgccgtcatggccccctgcttcctgctccttggagctggctcccggaccttgcccaccatccatgcagtggctcccagggcagagcctctccttgtactttggcagccatagaaagcgtgctcattttctgttttcctgtgttaggaaaaaaccacctgttttccaaggggaaagggcggggcctgaaggtgggggcgggggcctcttcattggcccagcttggcgaaagcgaggcacactgcttactgccttggggttgtggaaaatgnacccntgacctcntggaaggccgtgtggggggcaaccancctggcctgtgccatggtgggtgtcctggggcctgggcnganggancccccctcaccntgcaacccaagnttgnaagggnggccttgtttntccttgcccaaaantgntncnttnannggccgtgaagggcccactggnananncgggganattttttcctnnnnaaanaaaaggnnatttggnaaaanannnnnnnnnnnnnnnnnnnnnnnnnnnnnnnnnnggggnccnccccnaaa

SEQ ID NO: 619 - DNA, 1200 bp, Homo Sapiens
  misc_feature (1)..(2): n is a, c, g, or t
  misc_feature (237)..(237): n is a, c, g, or t
  misc_feature (495)..(495): n is a, c, g, or t
  misc_feature (497)..(497): n is a, c, g, or t
  misc_feature (842)..(842): n is a, c, g, or t
  misc_feature (860)..(860): n is a, c, g, or t
  misc_feature (930)..(930): n is a, c, g, or t
  misc_feature (991)..(991): n is a, c, g, or t
  misc_feature (997)..(997): n is a, c, g, or t
  misc_feature (1004)..(1004): n is a, c, g, or t
  misc_feature (1006)..(1006): n is a, c, g, or t
  misc_feature (1008)..(1009): n is a, c, g, or t
  misc_feature (1017)..(1017): n is a, c, g, or t
  misc_feature (1027)..(1027): n is a, c, g, or t
  misc_feature (1035)..(1035): n is a, c, g, or t
  misc_feature (1037)..(1038): n is a, c, g, or t
  misc_feature (1046)..(1046): n is a, c, g, or t
  misc_feature (1062)..(1062): n is a, c, g, or t
  misc_feature (1073)..(1073): n is a, c, g, or t
  misc_feature (1089)..(1089): n is a, c, g, or t
  misc_feature (1091)..(1091): n is a, c, g, or t
  misc_feature (1102)..(1102): n is a, c, g, or t
  misc_feature (1121)..(1121): n is a, c, g, or t
  misc_feature (1129)..(1129): n is a, c, g, or t
  misc_feature (1132)..(1132): n is a, c, g, or t
  misc_feature (1134)..(1135): n is a, c, g, or t
  misc_feature (1139)..(1139): n is a, c, g, or t
  misc_feature (1143)..(1143): n is a, c, g, or t
  misc_feature (1149)..(1149): n is a, c, g, or t
  misc_feature (1165)..(1165): n is a, c, g, or t
  misc_feature (1168)..(1169): n is a, c, g, or t
  misc_feature (1171)..(1171): n is a, c, g, or t
  misc_feature (1176)..(1176): n is a, c, g, or t
  misc_feature (1180)..(1180): n is a, c, g, or t
  misc_feature (1193)..(1193): n is a, c, g, or t
nnaatagagagaattaactatgagaggatcgcatcaccatcaccatcacggatcctatttaggtgacactatagaatcgtcgacccacgcgtccgtggaatgttcccctcagcctattctccgtggcagctgtggcaggcaccgtgctgctcactgtaggactcctggttctcctcgagtggcagctcaacactgccgaggccctgtttctctctgcctcagtgggcctctcagtanacttcactgtcaactactgcatctcctatcacctgtgcccacaccctgaccgcctgagccgtgtggccttctctctgcgccagaccagctgcgccacagccgtgggggctgcagccctgtttgcggcaggcgtgctcatgctgcctgccacagtgctgctctatcgcaagctgggcatcatcctcatgatggtcaaatgcgtcagttgtggctttgccagcttcttcttccaatctctctgctgtttcttcgggccananaagaactgtgggcagatcctctggccctgtgcccacctgccatgggatgctggtactggggaccctggtggggagaaggcaggccgcccacgaccagggtcagtgggagggatgcccgggtcctgctcagagcaatatgagctacagcccctggcacggcgtcggagccccagctttgacaccagcacagccaccagcaagctgtcccaccggccctcagtactctctgaggatctgcagctccatgatggtccgtgctgttcccggcccccaccagcccctgcctccccaagggagctgctgctggaccaccaggcagtcttcagccagtgccctgccctgcanacctcctccccctataancaggctggccccagccccaaaacccgggccaggcaggactcccaaggggaagaagctgaacccctgccancctcaccaaaaacccccaaccaactctcctaaggccaagggtgcaaatcctcctgaagggnttctgntcctcancnannaaccttgnaagggctcancgtccctnannaaaactgncctaacaacctttaancaaggcccggnaacaaaatccgggggngngtccccaaaanacctgaaaaaaactggggnacccatcnttnannaagnccanctcaanggaaaacggaaaaccntgnngnttggncctnaaaaaaaaagggnaaaaccc

SEQ ID NO: 620 - DNA, 1200 bp, Homo Sapiens
  misc_feature (7)..(7): n is a, c, g, or t
  misc_feature (284)..(284): n is a, c, g, or t
  misc_feature (872)..(872): n is a, c, g, or t
  misc_feature (903)..(903): n is a, c, g, or t
  misc_feature (915)..(915): n is a, c, g, or t
  misc_feature (944)..(944): n is a, c, g, or t
  misc_feature (957)..(957): n is a, c, g, or t
  misc_feature (963)..(963): n is a, c, g, or t
  misc_feature (965)..(965): n is a, c, g, or t
  misc_feature (979)..(979): n is a, c, g, or t
  misc_feature (984)..(984): n is a, c, g, or t
  misc_feature (997)..(997): n is a, c, g, or t
  misc_feature (1022)..(1023): n is a, c, g, or t
  misc_feature (1030)..(1030): n is a, c, g, or t
  misc_feature (1036)..(1036): n is a, c, g, or t
  misc_feature (1039)..(1040): n is a, c, g, or t
  misc_feature (1043)..(1043): n is a, c, g, or t
  misc_feature (1047)..(1047): n is a, c, g, or t
  misc_feature (1053)..(1053): n is a, c, g, or t
  misc_feature (1066)..(1066): n is a, c, g, or t
  misc_feature (1068)..(1068): n is a, c, g, or t
  misc_feature (1074)..(1074): n is a, c, g, or t
  misc_feature (1085)..(1085): n is a, c, g, or t
  misc_feature (1103)..(1103): n is a, c, g, or t
  misc_feature (1117)..(1117): n is a, c, g, or t
  misc_feature (1120)..(1120): n is a, c, g, or t
  misc_feature (1122)..(1122): n is a, c, g, or t
  misc_feature (1128)..(1128): n is a, c, g, or t
  misc_feature (1138)..(1140): n is a, c, g, or t
  misc_feature (1144)..(1144): n is a, c, g, or t
  misc_feature (1155)..(1155): n is a, c, g, or t
  misc_feature (1158)..(1159): n is a, c, g, or t
  misc_feature (1161)..(1161): n is a, c, g, or t
  misc_feature (1183)..(1185): n is a, c, g, or t
  misc_feature (1192)..(1193): n is a, c, g, or t
gagaaantactatgagaggatcgcatcaccatcaccatcacggatcctatttaggtgacactatagaatcgtcgacccacgcgtccgggttaacatttatttcatgtcagtacagggtgctttttcctttcagggacattctggaattgtattggttgtacattcttttgtgtctattctgtttgtcaagtgagtcaagacttgcttttgtccattttgatttgtgtgtattagtctgagtcttggctccgttttgaggtatgagcaaagttttgctggattanaagttaacctttagggaaattccttattttggtatgtggcaatgctaatagatccactgaagatctggaaaattccaggaacttttcacctgagcctttcttctgagaaatgctgcagtcagaagggtgtgctggtaaagtattttggtggcagctgccatcatggtcattgccttcatataacatgcttcgtgctcatggtcattgccttcatataacatgcttcgtgccatcatgatccttgccttcatataacaaacatgcttcgtcagaggtgttggggttgaaaaaggagctgcatgcttcactggagttgagggcctctctcctgttctgactttaagccagaacttgtggctgggccatggaagctgtgactcctctgtggacatggtggcagcagggaacccctagagagaggggccactgggaccaggcctcctgttgtggagggactcctgggacagtcctccaccctgtcctgtggtcctgtgtacagggttggcctcttcctcctcccctgccaggcctctgccccatgccccttccttccttctcctgggactggtgaagctaggcatctggaanacttcttcctagcctggaagccctgacctcngcccatctgcanaatcccccagttccttcacagctgccgantcctcccacgggntgcggngnaggcggccttgccnggggngctttctgggcanccaggggttccgggggggggaagannggccccncggggnacnnggncccngaaaangcccgccgggctncngggggnccctttgcccnttcccacccggaaaaaancccaaagggggggnaancngggggnaccccccccnnnggcnattcccccccnccnncnaaaaaagggggggggccggggnnnggccccnntaaaccc

SEQ ID NO: 621 - DNA, 1200 bp, Homo Sapiens; identical to SEQ ID NO: 204
  misc_feature (278)..(278): n is a, c, g, or t
  misc_feature (413)..(413): n is a, c, g, or t
  misc_feature (565)..(565): n is a, c, g, or t
  misc_feature (609)..(609): n is a, c, g, or t
  misc_feature (621)..(621): n is a, c, g, or t
  misc_feature (627)..(627): n is a, c, g, or t
  misc_feature (662)..(662): n is a, c, g, or t
  misc_feature (666)..(666): n is a, c, g, or t
  misc_feature (669)..(669): n is a, c, g, or t
  misc_feature (686)..(686): n is a, c, g, or t
  misc_feature (699)..(699): n is a, c, g, or t
  misc_feature (724)..(724): n is a, c, g, or t
  misc_feature (735)..(735): n is a, c, g, or t
  misc_feature (740)..(741): n is a, c, g, or t
  misc_feature (743)..(743): n is a, c, g, or t
  misc_feature (757)..(757): n is a, c, g, or t
  misc_feature (761)..(761): n is a, c, g, or t
  misc_feature (766)..(767): n is a, c, g, or t
  misc_feature (773)..(774): n is a, c, g, or t
  misc_feature (780)..(780): n is a, c, g, or t
  misc_feature (785)..(785): n is a, c, g, or t
  misc_feature (787)..(787): n is a, c, g, or t
  misc_feature (792)..(792): n is a, c, g, or t
  misc_feature (795)..(796): n is a, c, g, or t
  misc_feature (798)..(798): n is a, c, g, or t
  misc_feature (800)..(800): n is a, c, g, or t
  misc_feature (804)..(804): n is a, c, g, or t
  misc_feature (809)..(809): n is a, c, g, or t
  misc_feature (811)..(811): n is a, c, g, or t
  misc_feature (818)..(818): n is a, c, g, or t
  misc_feature (821)..(821): n is a, c, g, or t
  misc_feature (824)..(824): n is a, c, g, or t
  misc_feature (827)..(827): n is a, c, g, or t
  misc_feature (835)..(835): n is a, c, g, or t
  misc_feature (846)..(846): n is a, c, g, or t
  misc_feature (850)..(850): n is a, c, g, or t
  misc_feature (852)..(852): n is a, c, g, or t
  misc_feature (861)..(861): n is a, c, g, or t
  misc_feature (866)..(866): n is a, c, g, or t
  misc_feature (870)..(870): n is a, c, g, or t
  misc_feature (878)..(878): n is a, c, g, or t
  misc_feature (880)..(881): n is a, c, g, or t
  misc_feature (883)..(883): n is a, c, g, or t
  misc_feature (888)..(888): n is a, c, g, or t
  misc_feature (895)..(896): n is a, c, g, or t
  misc_feature (900)..(901): n is a, c, g, or t
  misc_feature (906)..(906): n is a, c, g, or t
  misc_feature (909)..(909): n is a, c, g, or t
  misc_feature (912)..(912): n is a, c, g, or t
  misc_feature (918)..(919): n is a, c, g, or t
  misc_feature (924)..(924): n is a, c, g, or t
  misc_feature (934)..(935): n is a, c, g, or t
  misc_feature (937)..(937): n is a, c, g, or t
  misc_feature (949)..(949): n is a, c, g, or t
  misc_feature (956)..(956): n is a, c, g, or t
  misc_feature (965)..(965): n is a, c, g, or t
  misc_feature (992)..(992): n is a, c, g, or t
  misc_feature (997)..(997): n is a, c, g, or t
  misc_feature (1010)..(1011): n is a, c, g, or t
  misc_feature (1013)..(1013): n is a, c, g, or t
  misc_feature (1015)..(1015): n is a, c, g, or t
  misc_feature (1017)..(1017): n is a, c, g, or t
  misc_feature (1026)..(1026): n is a, c, g, or t
  misc_feature (1033)..(1033): n is a, c, g, or t
  misc_feature (1036)..(1036): n is a, c, g, or t
  misc_feature (1038)..(1039): n is a, c, g, or t
  misc_feature (1051)..(1051): n is a, c, g, or t
  misc_feature (1068)..(1068): n is a, c, g, or t
  misc_feature (1074)..(1074): n is a, c, g, or t
  misc_feature (1076)..(1076): n is a, c, g, or t
  misc_feature (1078)..(1078): n is a, c, g, or t
  misc_feature (1080)..(1080): n is a, c, g, or t
  misc_feature (1085)..(1085): n is a, c, g, or t
  misc_feature (1087)..(1087): n is a, c, g, or t
  misc_feature (1099)..(1100): n is a, c, g, or t
  misc_feature (1103)..(1103): n is a, c, g, or t
  misc_feature (1106)..(1106): n is a, c, g, or t
  misc_feature (1111)..(1111): n is a, c, g, or t
  misc_feature (1115)..(1116): n is a, c, g, or t
  misc_feature (1119)..(1119): n is a, c, g, or t
  misc_feature (1123)..(1123): n is a, c, g, or t
  misc_feature (1126)..(1126): n is a, c, g, or t
  misc_feature (1129)..(1129): n is a, c, g, or t
  misc_feature (1143)..(1143): n is a, c, g, or t
  misc_feature (1146)..(1146): n is a, c, g, or t
  misc_feature (1148)..(1149): n is a, c, g, or t
  misc_feature (1161)..(1161): n is a, c, g, or t
  misc_feature (1169)..(1169): n is a, c, g, or t
  misc_feature (1173)..(1173): n is a, c, g, or t
  misc_feature (1177)..(1177): n is a, c, g, or t
  misc_feature (1181)..(1182): n is a, c, g, or t
  misc_feature (1187)..(1187): n is a, c, g, or t
  misc_feature (1192)..(1192): n is a, c, g, or t
  misc_feature (1197)..(1197): n is a, c, g, or t
  misc_feature (1200)..(1200): n is a, c, g, or t

SEQ ID NO: 622 - DNA, 1200 bp, Homo Sapiens
  misc_feature (1)..(1): n is a, c, g, or t
  misc_feature (3)..(3): n is a, c, g, or t
  misc_feature (770)..(770): n is a, c, g, or t
  misc_feature (872)..(872): n is a, c, g, or t
  misc_feature (893)..(893): n is a, c, g, or t
  misc_feature (899)..(899): n is a, c, g, or t
  misc_feature (932)..(932): n is a, c, g, or t
  misc_feature (935)..(935): n is a, c, g, or t
  misc_feature (947)..(947): n is a, c, g, or t
  misc_feature (956)..(956): n is a, c, g, or t
  misc_feature (960)..(960): n is a, c, g, or t
  misc_feature (968)..(968): n is a, c, g, or t
  misc_feature (977)..(977): n is a, c, g, or t
  misc_feature (985)..(985): n is a, c, g, or t
  misc_feature (995)..(995): n is a, c, g, or t
  misc_feature (997)..(997): n is a, c, g, or t
  misc_feature (1000)..(1000): n is a, c, g, or t
  misc_feature (1005)..(1005): n is a, c, g, or t
  misc_feature (1021)..(1021): n is a, c, g, or t
  misc_feature (1023)..(1023): n is a, c, g, or t
  misc_feature (1038)..(1038): n is a, c, g, or t
  misc_feature (1045)..(1045): n is a, c, g, or t
  misc_feature (1050)..(1050): n is a, c, g, or t
  misc_feature (1060)..(1060): n is a, c, g, or t
  misc_feature (1072)..(1072): n is a, c, g, or t
  misc_feature (1077)..(1078): n is a, c, g, or t
  misc_feature (1085)..(1085): n is a, c, g, or t
  misc_feature (1104)..(1104): n is a, c, g, or t
  misc_feature (1114)..(1114): n is a, c, g, or t
  misc_feature (1123)..(1123): n is a, c, g, or t
  misc_feature (1125)..(1125): n is a, c, g, or t
  misc_feature (1127)..(1127): n is a, c, g, or t
  misc_feature (1129)..(1129): n is a, c, g, or t
  misc_feature (1134)..(1134): n is a, c, g, or t
  misc_feature (1136)..(1136): n is a, c, g, or t
  misc_feature (1141)..(1141): n is a, c, g, or t
  misc_feature (1145)..(1145): n is a, c, g, or t
  misc_feature (1149)..(1149): n is a, c, g, or t
  misc_feature (1154)..(1154): n is a, c, g, or t
  misc_feature (1159)..(1159): n is a, c, g, or t
  misc_feature (1161)..(1161): n is a, c, g, or t
  misc_feature (1163)..(1165): n is a, c, g, or t
  misc_feature (1167)..(1167): n is a, c, g, or t
  misc_feature (1177)..(1177): n is a, c, g, or t
  misc_feature (1182)..(1185): n is a, c, g, or t
  misc_feature (1189)..(1189): n is a, c, g, or t
  misc_feature (1191)..(1191): n is a, c, g, or t
  misc_feature (1193)..(1193): n is a, c, g, or t
  misc_feature (1195)..(1195): n is a, c, g, or t
  misc_feature (1199)..(1200): n is a, c, g, or t
nantagagaaattactatgagaggatcgcatcaccatcaccatcacggatcctatttaggtgacactatagaatcgtcgacccacgcgtccgcacagagcccgtcccagaatatgttcaccatcaacagcgagactggagatatcgtcacagtggcggctggcctggaccgagagaaagttcagcagtacacagtcatcgttcaggccacagatatggaaggaaatctcaactatggcctctcaaacacagccacagccatcatcacggtgacagatgtgaatgacaacccgccagaatttaccgccagcacgtttgcaggggaggtccccgaaaaccgcgtggagaccgtggtcgcaaacctcacggtgatggaccgagatcagccccactctccaaactggaatgccgtttaccgcatcatcagtggggatccatccgggcacttcagcgtccgcacagatcccgtaaccaacgagggcatggtcaccgtggtgaaggcagtcgactacgagctcaacagagctttcatgctgacagtgatggtgtccaaccaggcgcccctggccagcggaatccagatgtccttccagtccacggcaggggtgaccatctccatcatggacatcaacgaggctccctacttcccctcaaaccacaagctgatccgcctggaggagggcgtgccccccggcaccgtgctgaccacgttttcagctgtggaccctgaccggttcatgcagcaggctgtgagatactcaaagctgtcanacccagcgagctggctgcacatcaatgccaccaacggccagatcaccacggcggcagtgctggaaccgtgagtccctctacaccaaaaacaacgtctacgangccaccttcctggcagctganaatggnatacccccggccagcggcaccgggaccctccanatntatctcattganatcaacganaacncccctganctgctgccnaggaggcncaaatttgcnanaanccaanctgaagccatcaaatnanggggccgaagctgantcaaccnaaatnggccctagtntcaactgccttntccannggcgggngaaaaatggaccatccccnctgaagggantagccaatnantngncctcngnactgnagcnggantagantcccntntnnncnaaattggaanccccnnnnaaantntntnaaann

SEQ ID NO: 623 - DNA, 1209 bp, Homo Sapiens
  misc_feature (555)..(555): n is a, c, g, or t
  misc_feature (612)..(612): n is a, c, g, or t
  misc_feature (696)..(696): n is a, c, g, or t
  misc_feature (705)..(705): n is a, c, g, or t
  misc_feature (708)..(708): n is a, c, g, or t
  misc_feature (716)..(716): n is a, c, g, or t
  misc_feature (720)..(720): n is a, c, g, or t
  misc_feature (723)..(723): n is a, c, g, or t
  misc_feature (725)..(725): n is a, c, g, or t
  misc_feature (730)..(730): n is a, c, g, or t
  misc_feature (738)..(738): n is a, c, g, or t
  misc_feature (740)..(740): n is a, c, g, or t
  misc_feature (742)..(742): n is a, c, g, or t
  misc_feature (748)..(748): n is a, c, g, or t
  misc_feature (754)..(754): n is a, c, g, or t
  misc_feature (768)..(770): n is a, c, g, or t
  misc_feature (774)..(774): n is a, c, g, or t
  misc_feature (777)..(777): n is a, c, g, or t
  misc_feature (779)..(779): n is a, c, g, or t
  misc_feature (785)..(786): n is a, c, g, or t
  misc_feature (789)..(789): n is a, c, g, or t
  misc_feature (791)..(791): n is a, c, g, or t
  misc_feature (794)..(794): n is a, c, g, or t
  misc_feature (796)..(796): n is a, c, g, or t
  misc_feature (802)..(803): n is a, c, g, or t
  misc_feature (810)..(810): n is a, c, g, or t
  misc_feature (812)..(813): n is a, c, g, or t
  misc_feature (815)..(815): n is a, c, g, or t
  misc_feature (817)..(818): n is a, c, g, or t
  misc_feature (821)..(822): n is a, c, g, or t
  misc_feature (824)..(826): n is a, c, g, or t
  misc_feature (833)..(833): n is a, c, g, or t
  misc_feature (835)..(835): n is a, c, g, or t
  misc_feature (837)..(837): n is a, c, g, or t
  misc_feature (840)..(843): n is a, c, g, or t
  misc_feature (846)..(848): n is a, c, g, or t
  misc_feature (850)..(850): n is a, c, g, or t
  misc_feature (853)..(853): n is a, c, g, or t
  misc_feature (856)..(857): n is a, c, g, or t
  misc_feature (859)..(861): n is a, c, g, or t
  misc_feature (867)..(868): n is a, c, g, or t
  misc_feature (870)..(875): n is a, c, g, or t
  misc_feature (877)..(912): n is a, c, g, or t
  misc_feature (914)..(914): n is a, c, g, or t
  misc_feature (917)..(919): n is a, c, g, or t
  misc_feature (922)..(934): n is a, c, g, or t
  misc_feature (937)..(955): n is a, c, g, or t
  misc_feature (957)..(958): n is a, c, g, or t
  misc_feature (960)..(979): n is a, c, g, or t
  misc_feature (982)..(1024): n is a, c, g, or t
  misc_feature (1026)..(1077): n is a, c, g, or t
  misc_feature (1079)..(1209): n is a, c, g, or t
agaaattactatgagaggatcgcatcaccatcaccatcacggatcctatttaggtgacactatagaatcgtcgacccacgcgtccgggggacggcgtcgggaccccactgactgtccctctgctggtgtccaggtggctgtggccatgggcaaggccctgctggaattcgtgtgggcccttcgcttccacatcgatgcgtgagtggcctgtggggctgggccaggccaggggtgcaggcagacacaggggtcttattgtgggggccccgtggagcctcgaggtggctgacaggcagcctggcctggtacttcccaaataggaagtgtgccaggcagggccgcagcgtgggtggtctgccacactgaggggagtgggaggtctggggtgtggtccctgccgagctcagcccccgccttcttgccggcagctacgtgcgccaggggctgttgtcggccgtctcctccgtcctgctcagcctgcctgctgcgcgcctgctggaggacctgatggacgagctgctggaagcccggtcctggctggcggacgtggctganaaagacccggacgaggactgcaggacgctggcactgagggccctgctgcttctgcanagactcaagaacaggctcctcccacccgcgtctccctagtccctggaggcctccccaggaccaccctcgccgacagcaaggcangcggctgancancggcctgnacancananccagnctttgtancnangccagntcttcngccgcatccggtannnaaantgnanatgcannaangnccngnctgccnntatttananngnanncanncnnntaaaaananantgnnnntgnnnantgnccnncnnnaaatgnnannnnnnannnnnnnnnnnnnnnnnnnnnnnnnnnnnnnnnnnntnaannnttnnnnnnnnnnnnnaannnnnnnnnnnnnnnnnnnannannnnnnnnnnnnnnnnnnnnaannnnnnnnnnnnnnnnnnnnnnnnnnnnnnnnnnnnnnnnnnnannnnnnnnnnnnnnnnnnnnnnnnnnnnnnnnnnnnnnnnnnnnnnnnnnnnannnnnnnnnnnnnnnnnnnnnnnnnnnnnnnnnnnnnnnnnnnnnnnnnnnnnnnnnnnnnnnnnnnnnnnnnnnnnnnnnnnnnnnnnnnnnnnnnnnnnnnnnnnnnnnnnnnnnnnnnnnnnnnnnnn

SEQ ID NO: 624 - DNA, 1328 bp, Homo Sapiens
  misc_feature (784)..(784): n is a, c, g, or t
  misc_feature (792)..(792): n is a, c, g, or t
  misc_feature (798)..(798): n is a, c, g, or t
  misc_feature (803)..(803): n is a, c, g, or t
  misc_feature (808)..(808): n is a, c, g, or t
  misc_feature (814)..(814): n is a, c, g, or t
  misc_feature (823)..(823): n is a, c, g, or t
  misc_feature (825)..(825): n is a, c, g, or t
  misc_feature (833)..(833): n is a, c, g, or t
  misc_feature (857)..(857): n is a, c, g, or t
  misc_feature (861)..(861): n is a, c, g, or t
  misc_feature (867)..(868): n is a, c, g, or t
  misc_feature (872)..(873): n is a, c, g, or t
  misc_feature (877)..(877): n is a, c, g, or t
  misc_feature (881)..(881): n is a, c, g, or t
  misc_feature (883)..(883): n is a, c, g, or t
  misc_feature (905)..(905): n is a, c, g, or t
  misc_feature (908)..(909): n is a, c, g, or t
  misc_feature (911)..(911): n is a, c, g, or t
  misc_feature (914)..(914): n is a, c, g, or t
  misc_feature (916)..(917): n is a, c, g, or t
  misc_feature (920)..(920): n is a, c, g, or t
  misc_feature (924)..(924): n is a, c, g, or t
  misc_feature (926)..(926): n is a, c, g, or t
  misc_feature (930)..(930): n is a, c, g, or t
  misc_feature (932)..(933): n is a, c, g, or t
  misc_feature (938)..(938): n is a, c, g, or t
  misc_feature (940)..(941): n is a, c, g, or t
  misc_feature (944)..(944): n is a, c, g, or t
  misc_feature (946)..(946): n is a, c, g, or t
  misc_feature (949)..(949): n is a, c, g, or t
  misc_feature (956)..(959): n is a, c, g, or t
  misc_feature (961)..(961): n is a, c, g, or t
  misc_feature (964)..(965): n is a, c, g, or t
  misc_feature (967)..(968): n is a, c, g, or t
  misc_feature (971)..(971): n is a, c, g, or t
  misc_feature (973)..(974): n is a, c, g, or t
  misc_feature (979)..(982): n is a, c, g, or t
  misc_feature (984)..(984): n is a, c, g, or t
  misc_feature (988)..(990): n is a, c, g, or t
  misc_feature (992)..(992): n is a, c, g, or t
  misc_feature (994)..(994): n is a, c, g, or t
  misc_feature (997)..(999): n is a, c, g, or t
  misc_feature (1001)..(1001): n is a, c, g, or t
  misc_feature (1004)..(1007): n is a, c, g, or t
  misc_feature (1009)..(1015): n is a, c, g, or t
  misc_feature (1022)..(1025): n is a, c, g, or t
  misc_feature (1028)..(1031): n is a, c, g, or t
  misc_feature (1033)..(1033): n is a, c, g, or t
  misc_feature (1035)..(1059): n is a, c, g, or t
  misc_feature (1061)..(1062): n is a, c, g, or t
  misc_feature (1064)..(1068): n is a, c, g, or t
  misc_feature (1070)..(1080): n is a, c, g, or t
  misc_feature (1082)..(1088): n is a, c, g, or t
  misc_feature (1090)..(1094): n is a, c, g, or t
  misc_feature (1096)..(1175): n is a, c, g, or t
  misc_feature (1178)..(1181): n is a, c, g, or t
  misc_feature (1184)..(1190): n is a, c, g, or t
  misc_feature (1192)..(1217): n is a, c, g, or t
  misc_feature (1219)..(1252): n is a, c, g, or t
  misc_feature (1256)..(1328): n is a, c, g, or t
agagaaaattactatgagaggatcgcatcaccatcaccatcacggatcctatttaggtgacactatagaatcgtcgacccacgcgtccgcccacgcgtccgttcccgctgagagtggtggggaagagccttgtcttcttagctgtcacctgccgaggcttctgggccactcaggccagtgcacccctgggcagagccccttaaagctgctgtcactagatgcccatggtccagggcctggtgggcgtgagaggataggtggcagggcagaaactgggcagccctgacttgatagcagcagggggagctcccaagctgccaagcccctgcctccagccttcctgagtttctctctcctgaaccctactctctcctttttgcttcctcagtttttatcaggctttctctgggggacagcagtctctgagcaccagggagcagttgccctcaggcctgtgcccagcatgccctcccctttttatacgaatgttttctaccagtgtgcttgggtttgccatgatgcgaggctgagttgctgtagcgtcttgattctctccctgggtctgcgttccctcccctgggcctgactgagcctgctcattgtttttccctttattacacaggacagccaggggaggaggggggcccagccctgggaggctggtgggaggcagggggcaggcctgcggatgcatgaaataatgttggcattattttttaattttttaaaaaataaatggtatcttatttaattgtcctgttccttcccactccccgcctcctangatgttancccaanctcanggtangcccanggggctggnanaaatgaanccacccatggggactggggaccangggncttcannatgnnttcnaagntncctcctccccctacccatctcntanntncanannaanaaangncccnannttaanannggntnaanttaaaannnngnttnnannttnannattgnnnngntggnnnantnaannnanttnnnnannnnnnnaaatttnnnnttnnnnangnnnnnnnnnnnnnnnnnnnnnnnnngnnannnnnannnnnnnnnnnannnnnnnannnnnannnnnnnnnnnnnnnnnnnnnnnnnnnnnnnnnnnnnnnnnnnnnnnnnnnnnnnnnnnnnnnnnnnnnnnnnnnnnnnnttnnnnaannnnnnnannnnnnnnnnnnnnnnnnnnnnnnnnannnnnnnnnnnnnnnnnnnnnnnnnnnnnnnnnnaaannnnnnnnnnnnnnnnnnnnnnnnnnnnnnnnnnnnnnnnnnnnnnnnnnnnnnnnnnnnnnnnnnnnnnnnn

SEQ ID NO: 625 - DNA, 1322 bp, Homo Sapiens
  misc_feature (820)..(820): n is a, c, g, or t
  misc_feature (826)..(826): n is a, c, g, or t
  misc_feature (828)..(828): n is a, c, g, or t
  misc_feature (861)..(861): n is a, c, g, or t
  misc_feature (866)..(866): n is a, c, g, or t
  misc_feature (871)..(871): n is a, c, g, or t
  misc_feature (873)..(873): n is a, c, g, or t
  misc_feature (903)..(903): n is a, c, g, or t
  misc_feature (909)..(909): n is a, c, g, or t
  misc_feature (930)..(930): n is a, c, g, or t
  misc_feature (938)..(938): n is a, c, g, or t
  misc_feature (940)..(940): n is a, c, g, or t
  misc_feature (942)..(942): n is a, c, g, or t
  misc_feature (944)..(944): n is a, c, g, or t
  misc_feature (952)..(952): n is a, c, g, or t
  misc_feature (961)..(961): n is a, c, g, or t
  misc_feature (967)..(967): n is a, c, g, or t
  misc_feature (973)..(974): n is a, c, g, or t
  misc_feature (987)..(987): n is a, c, g, or t
  misc_feature (998)..(998): n is a, c, g, or t
  misc_feature (1000)..(1000): n is a, c, g, or t
  misc_feature (1003)..(1003): n is a, c, g, or t
  misc_feature (1009)..(1009): n is a, c, g, or t
  misc_feature (1011)..(1011): n is a, c, g, or t
  misc_feature (1013)..(1014): n is a, c, g, or t
  misc_feature (1021)..(1021): n is a, c, g, or t
  misc_feature (1026)..(1026): n is a, c, g, or t
  misc_feature (1029)..(1029): n is a, c, g, or t
  misc_feature (1031)..(1031): n is a, c, g, or t
  misc_feature (1033)..(1033): n is a, c, g, or t
  misc_feature (1035)..(1035): n is a, c, g, or t
  misc_feature (1038)..(1038): n is a, c, g, or t
  misc_feature (1048)..(1049): n is a, c, g, or t
  misc_feature (1051)..(1051): n is a, c, g, or t
  misc_feature (1053)..(1053): n is a, c, g, or t
  misc_feature (1063)..(1065): n is a, c, g, or t
  misc_feature (1067)..(1068): n is a, c, g, or t
  misc_feature (1070)..(1070): n is a, c, g, or t
  misc_feature (1073)..(1073): n is a, c, g, or t
  misc_feature (1075)..(1075): n is a, c, g, or t
  misc_feature (1078)..(1080): n is a, c, g, or t
  misc_feature (1084)..(1084): n is a, c, g, or t
  misc_feature (1091)..(1093): n is a, c, g, or t
  misc_feature (1097)..(1097): n is a, c, g, or t
  misc_feature (1100)..(1102): n is a, c, g, or t
  misc_feature (1105)..(1108): n is a, c, g, or t
  misc_feature (1113)..(1113): n is a, c, g, or t
  misc_feature (1117)..(1117): n is a, c, g, or t
  misc_feature (1127)..(1129): n is a, c, g, or t
  misc_feature (1131)..(1133): n is a, c, g, or t
  misc_feature (1135)..(1135): n is a, c, g, or t
  misc_feature (1138)..(1140): n is a, c, g, or t
  misc_feature (1142)..(1143): n is a, c, g, or t
  misc_feature (1146)..(1146): n is a, c, g, or t
  misc_feature (1149)..(1150): n is a, c, g, or t
  misc_feature (1156)..(1157): n is a, c, g, or t
  misc_feature (1159)..(1164): n is a, c, g, or t
  misc_feature (1166)..(1166): n is a, c, g, or t
  misc_feature (1168)..(1170): n is a, c, g, or t
  misc_feature (1172)..(1179): n is a, c, g, or t
  misc_feature (1181)..(1184): n is a, c, g, or t
  misc_feature (1188)..(1192): n is a, c, g, or t
  misc_feature (1195)..(1195): n is a, c, g, or t
  misc_feature (1198)..(1198): n is a, c, g, or t
  misc_feature (1201)..(1211): n is a, c, g, or t
  misc_feature (1213)..(1240): n is a, c, g, or t
  misc_feature (1243)..(1243): n is a, c, g, or t
  misc_feature (1248)..(1272): n is a, c, g, or t
  misc_feature (1278)..(1280): n is a, c, g, or t
  misc_feature (1283)..(1287): n is a, c, g, or t
  misc_feature (1290)..(1293): n is a, c, g, or t
  misc_feature (1300)..(1300): n is a, c, g, or t
  misc_feature (1302)..(1302): n is a, c, g, or t
  misc_feature (1306)..(1312): n is a, c, g, or t
  misc_feature (1322)..(1322): n is a, c, g, or t
tagagaaattactatgagaggatcgcatcaccatcaccatcacggatcctatttaggtgacactatagaatcgtcgacccacgcgtccggcgagcacagagcctcgcctttgccgatccgccgcccgtccacacccgccgccagctcaccatggatgatgatatcgccgcgctcgtcgtcgacaacggctccggcatgtgcaaggccggcttcgcgggcgacgatgccccccgggccgtcttcccctccatcgtggggcgccccaggcaccagggcgtgatggtgggcatgggtcagaaggattcctatgtgggcgacgaggcccagagcaagagaggcatcctcaccctgaagtaccccatcgagcacggcatcgtcaccaactgggacgacatggagaaaatctggcaccacaccttctacaatgagctgcgtgtggctcccgaggagcaccccgtgctgctgaccgaggcccccctgaaccccaaggccaaccgcgagaagatgacccagatcatgtttgagaccttcaacaccccagccatgtacgttgctatccaggctgtgctatccctgtacgcctctggccgtaccactggcatcgtgatggactccggtgacggggtcacccacactgtgcccatctacgaggggtatgccctcccccatgccatcctgcgtctggacctggctggccgggacctgactgactacctcatgaagatcctcaccgagcgcggctacagcttcaccaccacggccgagcgggaaatcgtgcgtgacattaaggagaagctgtgctacgtcgccctggacttcnagcaananatggccacggctgcttccagctcctccctgganaaaanctacnanctgcctgacggccaggtcatcaccattggnaatgancggttccgctgccctgaggantcttccancntncnttctgggnatggagtcntgtggnatccannaaataccttcaantccatatgaangngangggaantncnnaaaaacntgtanccnananantgntgttgggggnncncntgtaccctgnnntnncnaangnatnnnaaangaaattnnngccntgnnnccnnnnaatgnaaantaaaattttnnncnnntnaannnannaantcnngggganngnnnnnncntnnngnnnnnnnntnnnntttnnnnnaanggnttnnnnnnnnnnntnnnnnnnnnnnnnnnnnnnnnnnnnnnnaanttttnnnnnnnnnnnnnnnnnnnnnnnnntttttnnnaannnnnttnnnnaaaaaananaatnnnnnnntttttttttn

SEQ ID NO: 626 - DNA, 1381 bp, Homo Sapiens
  misc_feature (735)..(735): n is a, c, g, or t
  misc_feature (877)..(877): n is a, c, g, or t
  misc_feature (883)..(883): n is a, c, g, or t
  misc_feature (906)..(906): n is a, c, g, or t
  misc_feature (929)..(929): n is a, c, g, or t
  misc_feature (944)..(944): n is a, c, g, or t
  misc_feature (976)..(976): n is a, c, g, or t
  misc_feature (979)..(979): n is a, c, g, or t
  misc_feature (988)..(988): n is a, c, g, or t
  misc_feature (1015)..(1015): n is a, c, g, or t
  misc_feature (1028)..(1028): n is a, c, g, or t
  misc_feature (1036)..(1036): n is a, c, g, or t
  misc_feature (1039)..(1040): n is a, c, g, or t
  misc_feature (1051)..(1051): n is a, c, g, or t
  misc_feature (1063)..(1063): n is a, c, g, or t
  misc_feature (1092)..(1092): n is a, c, g, or t
  misc_feature (1128)..(1128): n is a, c, g, or t
  misc_feature (1160)..(1160): n is a, c, g, or t
  misc_feature (1166)..(1166): n is a, c, g, or t
  misc_feature (1172)..(1172): n is a, c, g, or t
  misc_feature (1180)..(1180): n is a, c, g, or t
  misc_feature (1186)..(1186): n is a, c, g, or t
  misc_feature (1191)..(1191): n is a, c, g, or t
  misc_feature (1195)..(1197): n is a, c, g, or t
  misc_feature (1205)..(1205): n is a, c, g, or t
  misc_feature (1209)..(1209): n is a, c, g, or t
  misc_feature (1211)..(1211): n is a, c, g, or t
  misc_feature (1213)..(1213): n is a, c, g, or t
  misc_feature (1239)..(1239): n is a, c, g, or t
  misc_feature (1242)..(1242): n is a, c, g, or t
  misc_feature (1261)..(1261): n is a, c, g, or t
  misc_feature (1266)..(1266): n is a, c, g, or t
  misc_feature (1271)..(1271): n is a, c, g, or t
  misc_feature (1289)..(1289): n is a, c, g, or t
  misc_feature (1293)..(1293): n is a, c, g, or t
  misc_feature (1300)..(1300): n is a, c, g, or t
  misc_feature (1304)..(1304): n is a, c, g, or t
  misc_feature (1306)..(1306): n is a, c, g, or t
  misc_feature (1313)..(1313): n is a, c, g, or t
  misc_feature (1315)..(1315): n is a, c, g, or t
  misc_feature (1318)..(1318): n is a, c, g, or t
  misc_feature (1321)..(1321): n is a, c, g, or t
  misc_feature (1337)..(1337): n is a, c, g, or t
  misc_feature (1340)..(1341): n is a, c, g, or t
  misc_feature (1343)..(1343): n is a, c, g, or t
  misc_feature (1348)..(1348): n is a, c, g, or t
  misc_feature (1355)..(1355): n is a, c, g, or t
  misc_feature (1359)..(1359): n is a, c, g, or t
  misc_feature (1362)..(1366): n is a, c, g, or t
  misc_feature (1370)..(1370): n is a, c, g, or t
  misc_feature (1377)..(1378): n is a, c, g, or t
attagagaaattactatggagaggatcgcatcaccatcaccatcacggatcctatttaggtgacactatagaatcgtcgacccacgcgtccgcattttgtaggccgcttatttgtgtgcatccacggcgattcttcccgcagagttgtgaagcgaaaggcttacaattaaaaggaagaaaaaaaaataaagataattcgggagtacaattgacaaagcgtgtgggtcgctcagcctccagcagtaactgctgatctccagttcttggagggttccggtgagaagaacgcccctactgcggtactgaggaagcggcaggaggagatgcggcccctggacatagacgaggtggaagcgcctgaggaagtggaggtgctggagcccgaggaggatttcgagcagttcctgctcccggtcatcaacgagatgcgcgaggacatcgcgtctcttatacgcgagcgcgggcgggcgtacctgcggaccaggagcaagctgtgggagatggacaatatgcttatccagatcaaaacgcaggtggaggcctcggaggagagcgccctcaatcacgtgcagcacccgagtggcgaagccgacgagagagtgtcggagttgtgcgagaaggctgaggagaaagccaaggagattgcgaagatggcagagatgctggtcgagctcgtctggcgaatagagagaagcgagtcttcttgaaggaggagatcggtggttcacagctgangactgtagtcaactggtaaggatgaactgacaccttgaggaaactgaaacagcttgtcattttctctgttttgtttttgtatgttttttacccccatgtaacagtctcccttatggtcagtgattgatgacctcgatatggnatttanattatccaaatgtgtttggtttnggaaatataactttttgtcaaanaaatactctcaaaanagaaaatggggcttaattaagttgtttttttnggncccgtttantccttgtaacttcccctggggtttttnaaaatgttgggcnatggcccnccnnaattttgcctnttaccctttggngaccctgaattgtttttttggaaaccccntccaaaaacgtgggaatcaaaaatcttcccactttnaaaggggccaatggaaaaaaccctacccctcncttggnttgaancctggggnaaaaantgttnttannnaaactgcntttncntnaaacttgggaaaaaaaaaaaaaaaanttngaaaagaaaaagggttttnaaaantttgnaactttaattcccccggnaaanaaaaaanaaancnatttttngnccnttnccaaaaaatatggganccnncnggggnttttttnaaanaannnnnaccntttttannagg

SEQ ID NO: 627 - DNA, 1308 bp, Homo Sapiens
  misc_feature (763)..(763): n is a, c, g, or t
  misc_feature (818)..(818): n is a, c, g, or t
  misc_feature (839)..(839): n is a, c, g, or t
  misc_feature (863)..(863): n is a, c, g, or t
  misc_feature (874)..(874): n is a, c, g, or t
  misc_feature (899)..(900): n is a, c, g, or t
  misc_feature (902)..(934): n is a, c, g, or t
  misc_feature (938)..(938): n is a, c, g, or t
  misc_feature (943)..(943): n is a, c, g, or t
  misc_feature (949)..(949): n is a, c, g, or t
  misc_feature (953)..(954): n is a, c, g, or t
  misc_feature (957)..(958): n is a, c, g, or t
  misc_feature (960)..(960): n is a, c, g, or t
  misc_feature (962)..(962): n is a, c, g, or t
  misc_feature (966)..(966): n is a, c, g, or t
  misc_feature (971)..(971): n is a, c, g, or t
  misc_feature (974)..(976): n is a, c, g, or t
  misc_feature (981)..(981): n is a, c, g, or t
  misc_feature (985)..(985): n is a, c, g, or t
  misc_feature (988)..(988): n is a, c, g, or t
  misc_feature (990)..(990): n is a, c, g, or t
  misc_feature (992)..(992): n is a, c, g, or t
  misc_feature (999)..(999): n is a, c, g, or t
  misc_feature (1002)..(1003): n is a, c, g, or t
  misc_feature (1006)..(1006): n is a, c, g, or t
  misc_feature (1013)..(1013): n is a, c, g, or t
  misc_feature (1018)..(1018): n is a, c, g, or t
  misc_feature (1021)..(1024): n is a, c, g, or t
  misc_feature (1031)..(1031): n is a, c, g, or t
  misc_feature (1034)..(1034): n is a, c, g, or t
  misc_feature (1039)..(1039): n is a, c, g, or t
  misc_feature (1041)..(1041): n is a, c, g, or t
  misc_feature (1043)..(1043): n is a, c, g, or t
  misc_feature (1045)..(1045): n is a, c, g, or t
  misc_feature (1047)..(1048): n is a, c, g, or t
  misc_feature (1053)..(1053): n is a, c, g, or t
  misc_feature (1056)..(1058): n is a, c, g, or t
  misc_feature (1065)..(1065): n is a, c, g, or t
  misc_feature (1069)..(1070): n is a, c, g, or t
  misc_feature (1075)..(1075): n is a, c, g, or t
  misc_feature (1077)..(1081): n is a, c, g, or t
  misc_feature (1083)..(1084): n is a, c, g, or t
  misc_feature (1087)..(1087): n is a, c, g, or t
  misc_feature (1089)..(1091): n is a, c, g, or t
  misc_feature (1099)..(1101): n is a, c, g, or t
  misc_feature (1103)..(1115): n is a, c, g, or t
  misc_feature (1118)..(1119): n is a, c, g, or t
  misc_feature (1121)..(1123): n is a, c, g, or t
  misc_feature (1130)..(1135): n is a, c, g, or t
  misc_feature (1137)..(1138): n is a, c, g, or t
  misc_feature (1140)..(1142): n is a, c, g, or t
  misc_feature (1145)..(1150): n is a, c, g, or t
  misc_feature (1154)..(1155): n is a, c, g, or t
  misc_feature (1157)..(1157): n is a, c, g, or t
  misc_feature (1161)..(1163): n is a, c, g, or t
  misc_feature (1166)..(1171): n is a, c, g, or t
  misc_feature (1177)..(1178): n is a, c, g, or t
  misc_feature (1182)..(1188): n is a, c, g, or t
  misc_feature (1192)..(1214): n is a, c, g, or t
  misc_feature (1216)..(1232): n is a, c, g, or t
  misc_feature (1234)..(1241): n is a, c, g, or t
  misc_feature (1246)..(1257): n is a, c, g, or t
  misc_feature (1261)..(1271): n is a, c, g, or t
  misc_feature (1273)..(1281): n is a, c, g, or t
  misc_feature (1286)..(1304): n is a, c, g, or t
  misc_feature (1306)..(1308): n is a, c, g, or t
tagagaaattactatgagaggatcgcatcaccatcaccatcacggatcctatttaggtgacactatagaatcgtcgacccacgcgtccggcttcctgtgtaccactgaggggcagctgggccaggagctgtgcccggtgcctgcagccttcataagcacacacgtccattccctactaaggcccagacctcctggtatctgccccgggctccctcatcccacctccatccggagttgcccaagatgcatgtccagcataggcaggattgctcggtggtgagaaggttaggtccggctcagactgaataagaagagataaaatttgccttaaaacttacctggcagtggctttgctgcacggtctgaaaccacctgttcccaccctcttgaccgaaatttccttgtgacacagagaagggcaaaggtctgagcccagagttgacggagggagtatttcagggttcacttcaggggctcccaaagcgacaagatcgttagggagagaggcccagggtggggactgggaatttaaggagagctgggaacggatcccttaggttcaggaagcttctgtgcaagctgcgaggatggcttgggccgaagggttgctctgcccgccgcgctagctgtgagctgagcaaagccctgggctcacagcaccccaaaagcctgtggcttcagtcctgcgtctgcaccacacaatcaaaaggatcgttttgttttgtttttaaagaaaggtgagattggcttggttcttcatgancacatttgatatagctctttttctgtttttccttgctcatttcgttttggggaanaaatctgtactgtattgggantgtaaagaacatctctgcactcanacagtttacanaaataaatgttttttttgtttttcnnannnnnnnnnnnnnnnnnnnnnnnnnnnnnnnnngggnggccnctcccnaaannganncnantaancttantannnaactngganccngntnaaaaaanccnnaangaccccnaaacnccnnnnggatttnttnaaaancncngntnnccccnggnnnttttttntggnnaaaancnnnnnannttngnnnaatttttnnngnnnnnnnnnnnnnaanngnnnaaaaaannnnnngnnannnccnnnnnntaannancccnnnggnnnnnnaaaaanntttnnnnnnntttnnnnnnnnnnnnnnnnnnnnnnnannnnnnnnnnnnnnnnnannnnnnnnttttnnnnnnnnnnnnaaannnnnnnnnnntnnnnnnnnnttttnnnnnnnnnnnnnnnnnnnannn

SEQ ID NO: 628 - DNA, 1488 bp, Homo Sapiens
  misc_feature (2)..(3): n is a, c, g, or t
  misc_feature (5)..(6): n is a, c, g, or t
  misc_feature (9)..(9): n is a, c, g, or t
  misc_feature (13)..(13): n is a, c, g, or t
  misc_feature (26)..(26): n is a, c, g, or t
  misc_feature (81)..(81): n is a, c, g, or t
  misc_feature (258)..(258): n is a, c, g, or t
  misc_feature (318)..(318): n is a, c, g, or t
  misc_feature (546)..(546): n is a, c, g, or t
  misc_feature (682)..(682): n is a, c, g, or t
  misc_feature (733)..(733): n is a, c, g, or t
  misc_feature (764)..(764): n is a, c, g, or t
  misc_feature (772)..(773): n is a, c, g, or t
  misc_feature (815)..(815): n is a, c, g, or t
  misc_feature (821)..(821): n is a, c, g, or t
  misc_feature (845)..(846): n is a, c, g, or t
  misc_feature (848)..(848): n is a, c, g, or t
  misc_feature (852)..(852): n is a, c, g, or t
  misc_feature (860)..(860): n is a, c, g, or t
  misc_feature (863)..(863): n is a, c, g, or t
  misc_feature (866)..(866): n is a, c, g, or t
  misc_feature (869)..(869): n is a, c, g, or t
  misc_feature (876)..(876): n is a, c, g, or t
  misc_feature (878)..(878): n is a, c, g, or t
  misc_feature (894)..(894): n is a, c, g, or t
  misc_feature (911)..(911): n is a, c, g, or t
  misc_feature (934)..(934): n is a, c, g, or t
  misc_feature (941)..(941): n is a, c, g, or t
  misc_feature (943)..(943): n is a, c, g, or t
  misc_feature (947)..(947): n is a, c, g, or t
  misc_feature (950)..(950): n is a, c, g, or t
  misc_feature (960)..(960): n is a, c, g, or t
  misc_feature (973)..(973): n is a, c, g, or t
  misc_feature (979)..(979): n is a, c, g, or t
  misc_feature (992)..(992): n is a, c, g, or t
  misc_feature (995)..(995): n is a, c, g, or t
  misc_feature (998)..(998): n is a, c, g, or t
  misc_feature (1004)..(1004): n is a, c, g, or t
  misc_feature (1008)..(1008): n is a, c, g, or t
  misc_feature (1010)..(1010): n is a, c, g, or t
  misc_feature (1017)..(1017): n is a, c, g, or t
  misc_feature (1019)..(1019): n is a, c, g, or t
  misc_feature (1030)..(1031): n is a, c, g, or t
  misc_feature (1033)..(1034): n is a, c, g, or t
  misc_feature (1036)..(1036): n is a, c, g, or t
  misc_feature (1039)..(1039): n is a, c, g, or t
  misc_feature (1045)..(1046): n is a, c, g, or t
  misc_feature (1048)..(1048): n is a, c, g, or t
  misc_feature (1053)..(1056): n is a, c, g, or t
  misc_feature (1064)..(1064): n is a, c, g, or t
  misc_feature (1069)..(1069): n is a, c, g, or t
  misc_feature (1073)..(1073): n is a, c, g, or t
  misc_feature (1087)..(1087): n is a, c, g, or t
  misc_feature (1100)..(1100): n is a, c, g, or t
  misc_feature (1105)..(1106): n is a, c, g, or t
  misc_feature (1118)..(1118): n is a, c, g, or t
  misc_feature (1120)..(1120): n is a, c, g, or t
  misc_feature (1124)..(1124): n is a, c, g, or t
  misc_feature (1126)..(1126): n is a, c, g, or t
  misc_feature (1128)..(1128): n is a, c, g, or t
  misc_feature (1135)..(1135): n is a, c, g, or t
  misc_feature (1143)..(1143): n is a, c, g, or t
  misc_feature (1149)..(1150): n is a, c, g, or t
  misc_feature (1155)..(1155): n is a, c, g, or t
  misc_feature (1158)..(1158): n is a, c, g, or t
  misc_feature (1163)..(1163): n is a, c, g, or t
  misc_feature (1167)..(1167): n is a, c, g, or t
  misc_feature (1169)..(1169): n is a, c, g, or t
  misc_feature (1171)..(1171): n is a, c, g, or t
  misc_feature (1174)..(1174): n is a, c, g, or t
  misc_feature (1181)..(1181): n is a, c, g, or t
  misc_feature (1185)..(1185): n is a, c, g, or t
  misc_feature (1192)..(1192): n is a, c, g, or t
  misc_feature (1205)..(1205): n is a, c, g, or t
  misc_feature (1215)..(1216): n is a, c, g, or t
  misc_feature (1218)..(1219): n is a, c, g, or t
  misc_feature (1221)..(1221): n is a, c, g, or t
  misc_feature (1223)..(1223): n is a, c, g, or t
  misc_feature (1231)..(1231): n is a, c, g, or t
  misc_feature (1233)..(1234): n is a, c, g, or t
  misc_feature (1239)..(1239): n is a, c, g, or t
  misc_feature (1251)..(1252): n is a, c, g, or t
  misc_feature (1259)..(1259): n is a, c, g, or t
  misc_feature (1261)..(1261): n is a, c, g, or t
  misc_feature (1265)..(1265): n is a, c, g, or t
  misc_feature (1267)..(1268): n is a, c, g, or t
  misc_feature (1275)..(1275): n is a, c, g, or t
  misc_feature (1277)..(1280): n is a, c, g, or t
  misc_feature (1282)..(1283): n is a, c, g, or t
  misc_feature (1289)..(1290): n is a, c, g, or t
  misc_feature (1295)..(1296): n is a, c, g, or t
  misc_feature (1299)..(1301): n is a, c, g, or t
  misc_feature (1306)..(1308): n is a, c, g, or t
  misc_feature (1313)..(1313): n is a, c, g, or t
  misc_feature (1315)..(1315): n is a, c, g, or t
  misc_feature (1318)..(1318): n is a, c, g, or t
  misc_feature (1322)..(1322): n is a, c, g, or t
  misc_feature (1337)..(1337): n is a, c, g, or t
  misc_feature (1340)..(1340): n is a, c, g, or t
  misc_feature (1347)..(1347): n is a, c, g, or t
  misc_feature (1350)..(1350): n is a, c, g, or t
  misc_feature (1352)..(1352): n is a, c, g, or t
  misc_feature (1361)..(1361): n is a, c, g, or t
  misc_feature (1368)..(1368): n is a, c, g, or t
  misc_feature (1379)..(1379): n is a, c, g, or t
  misc_feature (1381)..(1381): n is a, c, g, or t
  misc_feature (1384)..(1385): n is a, c, g, or t
  misc_feature (1388)..(1390): n is a, c, g, or t
  misc_feature (1409)..(1409): n is a, c, g, or t
  misc_feature (1411)..(1411): n is a, c, g, or t
  misc_feature (1418)..(1420): n is a, c, g, or t
  misc_feature (1422)..(1422): n is a, c, g, or t
  misc_feature (1425)..(1425): n is a, c, g, or t
  misc_feature (1430)..(1430): n is a, c, g, or t
  misc_feature (1441)..(1441): n is a, c, g, or t
  misc_feature (1444)..(1446): n is a, c, g, or t
  misc_feature (1458)..(1458): n is a, c, g, or t
  misc_feature (1460)..(1462): n is a, c, g, or t
  misc_feature (1470)..(1470): n is a, c, g, or t
  misc_feature (1476)..(1476): n is a, c, g, or t
  misc_feature (1479)..(1479): n is a, c, g, or t
  misc_feature (1483)..(1483): n is a, c, g, or t
cnncnnaanaatngagaaattactangagaggatcgcatcaccatcaccatcacggtatcctatttaggtgacacatatanaatcgtcgacccacgcgttccggaggattcagcagcctcccccttgagccccctcgcttcccgacgttccgttcccccctgcccgccttctcccgccaccgccgccgccgccttccgcaggccgtttccaccgaggaaaaggaatcgtatcgtatgtccgctatccagaacctccantctttcgacccctttgctgatgcaagtaagggtgatgacctgcttcctgctggcactgangattatatccatataagaattcaacagagaaacggcaggaagacccttactactgtccaagggatcgctgatgattacgataaaaagaaactagtgaaggcgtttaagaaaaagtttgcctgcaatggtactgtaattgagcatccggaatatggagaagtaattcagctacagggtgaccaacgcaagaacatatgccagttcctcgtaaagattggactggctaangacgatcagctgaaggttcatgggttttaagtgcttgtggctcactgaagcttaagtgaggatttccttgcaatgagtagaatttcccttctctcccttgtcacaggtttaaaaaacctcacagcttgtataatgnaaccaatttggggtccgcttttaacttggactagtgtaacttccttcatgnaataaaactgaaaaagagccatgctgtctantcttgaanncccctcatttaaacagaagttcaaagcaataaggcgcctggncagtgntcaagccttgaaaaccaaagcaannancgtncatgtttncanccnaanccccaanangcccttaaaaaattantaaaaaaactattgggncgggaaaccttcttccaagcttnttccccntnaganaanagtttccccnacccctaaaaaanaaaatntttaccaccctgnaancantccctnccgntnaattctnanaaaagaaaaannanngntantaaggnnantaaannnncctacttngtatntacnttaaaaaggtaatntttttgggggggnaaaanncccccgggttgntnttcncnancctgganatataggnggtacnnaaaanttncaaanaaantncnctntttttcnctanatggtanagttaaataaganacatttgtgnntnngncnataaaagntnnatttnccaaccagtaanntactccncnatcntnnggggagntnnnncnntcactnnaaaanntgnnntaatnnncaaancnctntctnttcacagatatttanacnttttttnaananggggataanaaatctncttaaatgtgntntcnnttnnncactgtggataactaatgnantataaannncnatntgacntatatatatanaannntcctgctttctntnnnactatgtnatagangtnatanaataa

SEQ ID NO: 629 - DNA, 1392 bp, Homo Sapiens
  misc_feature (733)..(733): n is a, c, g, or t
  misc_feature (763)..(763): n is a, c, g, or t
  misc_feature (791)..(791): n is a, c, g, or t
  misc_feature (794)..(794): n is a, c, g, or t
  misc_feature (804)..(804): n is a, c, g, or t
  misc_feature (807)..(807): n is a, c, g, or t
  misc_feature (813)..(813): n is a, c, g, or t
  misc_feature (819)..(819): n is a, c, g, or t
  misc_feature (822)..(822): n is a, c, g, or t
  misc_feature (824)..(824): n is a, c, g, or t
  misc_feature (827)..(827): n is a, c, g, or t
  misc_feature (832)..(832): n is a, c, g, or t
  misc_feature (835)..(836): n is a, c, g, or t
  misc_feature (838)..(838): n is a, c, g, or t
  misc_feature (840)..(841): n is a, c, g, or t
  misc_feature (848)..(848): n is a, c, g, or t
  misc_feature (860)..(860): n is a, c, g, or t
  misc_feature (869)..(870): n is a, c, g, or t
  misc_feature (872)..(872): n is a, c, g, or t
  misc_feature (879)..(879): n is a, c, g, or t
  misc_feature (884)..(884): n is a, c, g, or t
  misc_feature (886)..(888): n is a, c, g, or t
  misc_feature (894)..(895): n is a, c, g, or t
  misc_feature (897)..(897): n is a, c, g, or t
  misc_feature (902)..(902): n is a, c, g, or t
  misc_feature (908)..(909): n is a, c, g, or t
  misc_feature (911)..(911): n is a, c, g, or t
  misc_feature (918)..(918): n is a, c, g, or t
  misc_feature (920)..(920): n is a, c, g, or t
  misc_feature (922)..(922): n is a, c, g, or t
  misc_feature (928)..(931): n is a, c, g, or t
  misc_feature (937)..(939): n is a, c, g, or t
  misc_feature (944)..(944): n is a, c, g, or t
  misc_feature (948)..(950): n is a, c, g, or t
  misc_feature (953)..(954): n is a, c, g, or t
  misc_feature (956)..(956): n is a, c, g, or t
  misc_feature (961)..(961): n is a, c, g, or t
  misc_feature (966)..(971): n is a, c, g, or t
  misc_feature (973)..(976): n is a, c, g, or t
  misc_feature (979)..(979): n is a, c, g, or t
  misc_feature (981)..(984): n is a, c, g, or t
  misc_feature (987)..(990): n is a, c, g, or t
  misc_feature (992)..(999): n is a, c, g, or t
  misc_feature (1002)..(1004): n is a, c, g, or t
  misc_feature (1006)..(1007): n is a, c, g, or t
  misc_feature (1009)..(1011): n is a, c, g, or t
  misc_feature (1014)..(1014): n is a, c, g, or t
  misc_feature (1016)..(1023): n is a, c, g, or t
  misc_feature (1025)..(1026): n is a, c, g, or t
  misc_feature (1028)..(1079): n is a, c, g, or t
  misc_feature (1082)..(1096): n is a, c, g, or t
  misc_feature (1098)..(1132): n is a, c, g, or t
  misc_feature (1134)..(1138): n is a, c, g, or t
  misc_feature (1140)..(1392): n is a, c, g, or t
tagagaaattactatgagaggatcgcatcaccatcaccatcacggatcctatttaggtgacactatagaatcgtcgacccacgcgtccggccagctctcgcactctgtttttccgccgctccgccgtcgcgtttctctgccggtcgcaatggaagaagagatcgccgcgctggtcattgacaatggctccggcatgtgcaaagctggttttgctggggacgacgctccccgagccgtgtttccttccatcgtcgggcgccccagacaccagggcgtcatggtgggcatgggccagaaggactcctacgtgggcgacgaggcccagagcaagcgtggcatcctgaccctgaagtaccccattgagcatggcatcgtcaccaactgggacgacatggagaagatctggcaccacaccttctacaacgagctgcgcgtggccccggaggagcacccagtgctgctgaccgaggcccccctgaaccccaaggccaacagagagaagatgactcagattatgtttgagaccttcaacaccccggccatgtacgtggccatccaggccgtgctgtccctctacgcctctgggcgcaccactggcattgtcatggactctggagacggggtcacccacacggtgcccatctacgagggctacgccctcccccacgccatcctgcgtctggacctggctggccgggacctgaccgactacctcatgaagatcctcactgancgaggctacagcttcaccaccacggccgancgggaaaatcgtgcgcgacatcaagganaanctgtgctacntcnccctgnacttcnagnanganatggncanngncnnatcctcntcttctctgganaaaaactannanctgcccnatggncnnntcatcnncnttggnaatganngnttccggngncnggaagnnnntgttcnnnccttncttnnnggnnanggaancttgnnnnnncnnnnaanannnnttnnnntnnnnnnnnaannngnnannnggnannnnnnnnannannnnnnnnnnnnnnnnnnnnnnnnnnnnnnnnnnnnnnnnnnnnnnnnnnnnttnnnnnnnnnnnnnnnannnnnnnnnnnnnnnnnnnnnnnnnnnnnnnnnnnannnnnannnnnnnnnnnnnnnnnnnnnnnnnnnnnnnnnnnnnnnnnnnnnnnnnnnnnnnnnnnnnnnnnnnnnnnnnnnnnnnnnnnnnnnnnnnnnnnnnnnnnnnnnnnnnnnnnnnnnnnnnnnnnnnnnnnnnnnnnnnnnnnnnnnnnnnnnnnnnnnnnnnnnnnnnnnnnnnnnnnnnnnnnnnnnnnnnnnnnnnnnnnnnnnnnnnnnnnnnnnnnnnnnnnnnnnnnnnnnnnnnnnnnnnnnnnnn

SEQ ID NO: 630 - DNA, 1385 bp, Homo Sapiens
  misc_feature (867)..(867): n is a, c, g, or t
  misc_feature (881)..(881): n is a, c, g, or t
  misc_feature (890)..(890): n is a, c, g, or t
  misc_feature (901)..(901): n is a, c, g, or t
  misc_feature (903)..(903): n is a, c, g, or t
  misc_feature (905)..(905): n is a, c, g, or t
  misc_feature (907)..(907): n is a, c, g, or t
  misc_feature (911)..(911): n is a, c, g, or t
  misc_feature (924)..(924): n is a, c, g, or t
  misc_feature (932)..(932): n is a, c, g, or t
  misc_feature (948)..(948): n is a, c, g, or t
  misc_feature (950)..(951): n is a, c, g, or t
  misc_feature (958)..(958): n is a, c, g, or t
  misc_feature (963)..(963): n is a, c, g, or t
  misc_feature (995)..(995): n is a, c, g, or t
  misc_feature (999)..(999): n is a, c, g, or t
  misc_feature (1009)..(1009): n is a, c, g, or t
  misc_feature (1017)..(1017): n is a, c, g, or t
  misc_feature (1027)..(1027): n is a, c, g, or t
  misc_feature (1033)..(1033): n is a, c, g, or t
  misc_feature (1056)..(1057): n is a, c, g, or t
  misc_feature (1059)..(1059): n is a, c, g, or t
  misc_feature (1064)..(1064): n is a, c, g, or t
  misc_feature (1070)..(1070): n is a, c, g, or t
  misc_feature (1073)..(1073): n is a, c, g, or t
  misc_feature (1076)..(1077): n is a, c, g, or t
  misc_feature (1084)..(1085): n is a, c, g, or t
  misc_feature (1098)..(1098): n is a, c, g, or t
  misc_feature (1102)..(1102): n is a, c, g, or t
  misc_feature (1106)..(1107): n is a, c, g, or t
  misc_feature (1110)..(1111): n is a, c, g, or t
  misc_feature (1114)..(1114): n is a, c, g, or t
  misc_feature (1117)..(1117): n is a, c, g, or t
  misc_feature (1120)..(1121): n is a, c, g, or t
  misc_feature (1125)..(1128): n is a, c, g, or t
  misc_feature (1133)..(1133): n is a, c, g, or t
  misc_feature (1139)..(1139): n is a, c, g, or t
  misc_feature (1141)..(1141): n is a, c, g, or t
  misc_feature (1145)..(1148): n is a, c, g, or t
  misc_feature (1150)..(1150): n is a, c, g, or t
  misc_feature (1157)..(1157): n is a, c, g, or t
  misc_feature (1162)..(1164): n is a, c, g, or t
  misc_feature (1169)..(1170): n is a, c, g, or t
  misc_feature (1172)..(1174): n is a, c, g, or t
  misc_feature (1177)..(1179): n is a, c, g, or t
  misc_feature (1183)..(1185): n is a, c, g, or t
  misc_feature (1187)..(1189): n is a, c, g, or t
  misc_feature (1191)..(1191): n is a, c, g, or t
  misc_feature (1198)..(1199): n is a, c, g, or t
  misc_feature (1201)..(1201): n is a, c, g, or t
  misc_feature (1203)..(1203): n is a, c, g, or t
  misc_feature (1206)..(1206): n is a, c, g, or t
  misc_feature (1208)..(1216): n is a, c, g, or t
  misc_feature (1218)..(1225): n is a, c, g, or t
  misc_feature (1228)..(1228): n is a, c, g, or t
  misc_feature (1232)..(1233): n is a, c, g, or t
  misc_feature (1236)..(1236): n is a, c, g, or t
  misc_feature (1238)..(1241): n is a, c, g, or t
  misc_feature (1243)..(1243): n is a, c, g, or t
  misc_feature (1245)..(1245): n is a, c, g, or t
  misc_feature (1251)..(1251): n is a, c, g, or t
  misc_feature (1255)..(1256): n is a, c, g, or t
  misc_feature (1259)..(1262): n is a, c, g, or t
  misc_feature (1264)..(1272): n is a, c, g, or t
  misc_feature (1275)..(1275): n is a, c, g, or t
  misc_feature (1278)..(1278): n is a, c, g, or t
  misc_feature (1280)..(1286): n is a, c, g, or t
  misc_feature (1290)..(1293): n is a, c, g, or t
  misc_feature (1295)..(1296): n is a, c, g, or t
  misc_feature (1300)..(1303): n is a, c, g, or t
  misc_feature (1307)..(1312): n is a, c, g, or t
  misc_feature (1314)..(1321): n is a, c, g, or t
  misc_feature (1323)..(1328): n is a, c, g, or t
  misc_feature (1331)..(1333): n is a, c, g, or t
  misc_feature (1335)..(1340): n is a, c, g, or t
  misc_feature (1342)..(1342): n is a, c, g, or t
  misc_feature (1348)..(1348): n is a, c, g, or t
  misc_feature (1351)..(1354): n is a, c, g, or t
  misc_feature (1357)..(1372): n is a, c, g, or t
  misc_feature (1377)..(1385): n is a, c, g, or t
attagagaaattactatgagaggatcgcatcaccatcaccatcacggatcctatttaggtgacactatagaatcgtcgacccacgcgtccgcggaatggaatgagactaacaggcaatgcctctgctgtttgaccagggcagacccaccttccctccacacacccacccctctgcacaggccaggagtgggaggaggcccctcagacagaaactgcatctcagaaccatcaacagctgcccctgtctgatctcctctggcctctgtcatccccacccctgcaatggagtgagggctgtgaccccgggtccctggatgcttaatcttgtcctgtgtgctggccttggccaggtcacctactctcctgtatgaggccacagcaggtgtccagaaatgcctttcagacgtgccctgcaccccagcacctcctgaacaagttcctgaagacagcccggcagagtggtggacacaagtctctggcctctggcaggacagaggagggactatgcattcctgtcacagtccttggtccttgggcccagcaggaggaatcggagcttggctgcgccccttacccccaccacatcagaatccattacaccacctaccactgctgtcactcaaatgatgctgtcactcaaagccatccttcctggaaaacatttccacacactctgccgctatctgtccttcctcccttgtctctctgctctagagtttgcaaaggaaacacacctgagttcagggaccaggccagcccagtgcgtgttgacaccgtcttaaacaagactctgttaaaactagatgcttctgtaaagcaacatgttccattaggagaatgaaaaggcaaaccacaaaatggaggaanacatttgcaaaaanattaaaccnaacaaaagtcnancnanccanaaggtgtaagggnactcctanaggtcaggaaaaaacncnncgtgcantaagnccggtggggaaccctgaatgaaaaaacacccnccanaaaagaaagnaactccanttgtccaacngggcangggggggttgtttggttcaaaanncncaccntgaaanccnccnntgaaaanncactcccccaaangggntggnnaannaantgnccnncccnnnngtganggaaancnaaannnntnggccctnttggnnntgggnnannnttnnngggnnncnnncnaaaaaanntnangangnnnnnnnnncnnnnnnnnggntttnnttncnnnnantnaaaccnaggnnggnnnncnnnnnnnnnaanaanannnnnnntttnnnngnnaaannnnaaannnnnncnnnnnnnngnnnnnnggnnngnnnnnngngggggnggnnnnttnnnnnnnnnnnnnnnnaaaannnnnnnnn

SEQ ID NO: 631 - DNA, 1369 bp, Homo Sapiens
  misc_feature (706)..(706): n is a, c, g, or t
  misc_feature (715)..(715): n is a, c, g, or t
  misc_feature (723)..(723): n is a, c, g, or t
  misc_feature (772)..(772): n is a, c, g, or t
  misc_feature (794)..(794): n is a, c, g, or t
  misc_feature (806)..(806): n is a, c, g, or t
  misc_feature (809)..(809): n is a, c, g, or t
  misc_feature (818)..(818): n is a, c, g, or t
  misc_feature (842)..(842): n is a, c, g, or t
  misc_feature (861)..(861): n is a, c, g, or t
  misc_feature (864)..(864): n is a, c, g, or t
  misc_feature (873)..(873): n is a, c, g, or t
  misc_feature (875)..(875): n is a, c, g, or t
  misc_feature (880)..(880): n is a, c, g, or t
  misc_feature (883)..(886): n is a, c, g, or t
  misc_feature (890)..(891): n is a, c, g, or t
  misc_feature (899)..(899): n is a, c, g, or t
  misc_feature (902)..(902): n is a, c, g, or t
  misc_feature (905)..(905): n is a, c, g, or t
  misc_feature (907)..(907): n is a, c, g, or t
  misc_feature (910)..(910): n is a, c, g, or t
  misc_feature (912)..(912): n is a, c, g, or t
  misc_feature (914)..(914): n is a, c, g, or t
  misc_feature (919)..(919): n is a, c, g, or t
  misc_feature (922)..(922): n is a, c, g, or t
  misc_feature (924)..(924): n is a, c, g, or t
  misc_feature (926)..(926): n is a, c, g, or t
  misc_feature (929)..(930): n is a, c, g, or t
  misc_feature (934)..(934): n is a, c, g, or t
  misc_feature (937)..(938): n is a, c, g, or t
  misc_feature (941)..(942): n is a, c, g, or t
  misc_feature (948)..(953): n is a, c, g, or t
  misc_feature (955)..(955): n is a, c, g, or t
  misc_feature (961)..(962): n is a, c, g, or t
  misc_feature (965)..(965): n is a, c, g, or t
  misc_feature (967)..(974): n is a, c, g, or t
  misc_feature (977)..(979): n is a, c, g, or t
  misc_feature (981)..(982): n is a, c, g, or t
  misc_feature (984)..(984): n is a, c, g, or t
  misc_feature (986)..(987): n is a, c, g, or t
  misc_feature (990)..(991): n is a, c, g, or t
  misc_feature (993)..(995): n is a, c, g, or t
  misc_feature (997)..(997): n is a, c, g, or t
  misc_feature (1000)..(1000): n is a, c, g, or t
  misc_feature (1002)..(1010): n is a, c, g, or t
  misc_feature (1013)..(1015): n is a, c, g, or t
  misc_feature (1018)..(1027): n is a, c, g, or t
  misc_feature (1032)..(1369): n is a, c, g, or t
attagagaaattactatgagaggatcgcatcaccatcaccatcacggatcctatttaggtgacactatagaatcgtcgacccacgcgtccgcctcttcagcctgccaggggcctggggcctggtggggggtatggccacacccacaagggcgagtgccagagctgtgtggacagctgtcccaggacctgccggggagcagcagctccactgcagcagggcgggcatggccggtagggggagtgcaaggccaggcagacgcccccattccccacactcccctacctagaaaagctcagctcaggcgtcctctcctggtgctactcctgctgggtgtgcgggaatcggcactctggccctcagtgcaggatggtcaacttgcacccaccgtgctcagcttcagcttgggaagaggtcggccctgggtttgcgggaagtgggctccagccaggatggcccagggatgggcagtccacagggcctttctggtgtgggtctggtgagccgaggggctacggtacacaatggctatgtccatggctattcgccttggggcagggctcggtttggcagcctctttccttcacttggaacctgggcagccaggtgggctggtggctctcagctgccctccacgaggttggggcacccctgatccccaggcctgccttgccctctgctcttctggcaccaggctgggcagtgcanacagcgcanccctgcanccttcaggacaccttgttcccaggccctgcaatccaccaagctggatanatggggccccccttgatggtancgggaaggtcanggntaaccccanggccctgctgctgccttaccttgntggggtgactgcttgattnaanaaccccaanantggancannnnctgnngtccccanacntgnanttntngnccaanaangnangtnntttnaannaannccctgnnnnnngntcccannaantnnnnnnnnggnnntnntnannaanntnnntnaantnnnnnnnnnaannnaannnnnnnnnnccttnnnnnnnnnnnnnnnnnnnnnnnnnnnnnnnnnnnnnnnnnnnnnnnnnnnnnnnnnnnnnnnnnnnnnnnnnnnnnnnnnnnnnnnnnnnnnnnnnnnnnnnnnnnnnnnnnnnnnnnnnnnnnnnnnnnnnnnnnnnnnnnnnnnnnnnnnnnnnnnnnnnnnnnnnnnnnnnnnnnnnnnnnnnnnnnnnnnnnnnnnnnnnnnnnnnnnnnnnnnnnnnnnnnnnnnnnnnnnnnnnnnnnnnnnnnnnnnnnnnnnnnnnnnnnnnnnnnnnnnnnnnnnnnnnnnnnnnnnnnnnnnnnnnnnnnnnnnnnnnnnnnnnnnnnnnnnnnnnn

SEQ ID NO: 632 - DNA, 1351 bp, Homo Sapiens
  misc_feature (104)..(104): n is a, c, g, or t
  misc_feature (124)..(124): n is a, c, g, or t
  misc_feature (130)..(130): n is a, c, g, or t
  misc_feature (156)..(156): n is a, c, g, or t
  misc_feature (168)..(168): n is a, c, g, or t
  misc_feature (177)..(177): n is a, c, g, or t
  misc_feature (183)..(184): n is a, c, g, or t
  misc_feature (270)..(270): n is a, c, g, or t
  misc_feature (281)..(281): n is a, c, g, or t
  misc_feature (304)..(304): n is a, c, g, or t
  misc_feature (314)..(314): n is a, c, g, or t
  misc_feature (326)..(326): n is a, c, g, or t
  misc_feature (357)..(357): n is a, c, g, or t
  misc_feature (359)..(359): n is a, c, g, or t
  misc_feature (377)..(377): n is a, c, g, or t
  misc_feature (391)..(391): n is a, c, g, or t
  misc_feature (395)..(395): n is a, c, g, or t
  misc_feature (410)..(410): n is a, c, g, or t
  misc_feature (412)..(412): n is a, c, g, or t
  misc_feature (415)..(415): n is a, c, g, or t
  misc_feature (524)..(524): n is a, c, g, or t
  misc_feature (527)..(527): n is a, c, g, or t
  misc_feature (664)..(664): n is a, c, g, or t
  misc_feature (687)..(687): n is a, c, g, or t
  misc_feature (702)..(702): n is a, c, g, or t
  misc_feature (707)..(707): n is a, c, g, or t
  misc_feature (721)..(722): n is a, c, g, or t
  misc_feature (761)..(762): n is a, c, g, or t
  misc_feature (778)..(778): n is a, c, g, or t
  misc_feature (782)..(782): n is a, c, g, or t
  misc_feature (792)..(792): n is a, c, g, or t
  misc_feature (817)..(817): n is a, c, g, or t
  misc_feature (819)..(819): n is a, c, g, or t
  misc_feature (858)..(858): n is a, c, g, or t
  misc_feature (869)..(869): n is a, c, g, or t
  misc_feature (872)..(872): n is a, c, g, or t
  misc_feature (874)..(874): n is a, c, g, or t
  misc_feature (878)..(878): n is a, c, g, or t
  misc_feature (891)..(892): n is a, c, g, or t
  misc_feature (894)..(894): n is a, c, g, or t
  misc_feature (897)..(897): n is a, c, g, or t
  misc_feature (902)..(902): n is a, c, g, or t
  misc_feature (911)..(911): n is a, c, g, or t
  misc_feature (919)..(919): n is a, c, g, or t
  misc_feature (941)..(941): n is a, c, g, or t
  misc_feature (946)..(946): n is a, c, g, or t
  misc_feature (950)..(950): n is a, c, g, or t
  misc_feature (966)..(966): n is a, c, g, or t
  misc_feature (968)..(968): n is a, c, g, or t
  misc_feature (974)..(974): n is a, c, g, or t
  misc_feature (989)..(989): n is a, c, g, or t
  misc_feature (993)..(994): n is a, c, g, or t
  misc_feature (1011)..(1011): n is a, c, g, or t
  misc_feature (1019)..(1019): n is a, c, g, or t
  misc_feature (1026)..(1026): n is a, c, g, or t
  misc_feature (1035)..(1035): n is a, c, g, or t
  misc_feature (1041)..(1041): n is a, c, g, or t
  misc_feature (1059)..(1059): n is a, c, g, or t
  misc_feature (1074)..(1074): n is a, c, g, or t
  misc_feature (1077)..(1077): n is a, c, g, or t
  misc_feature (1084)..(1084): n is a, c, g, or t
  misc_feature (1090)..(1090): n is a, c, g, or t
  misc_feature (1094)..(1096): n is a, c, g, or t
  misc_feature (1098)..(1098): n is a, c, g, or t
  misc_feature (1104)..(1107): n is a, c, g, or t
  misc_feature (1118)..(1118): n is a, c, g, or t
  misc_feature (1121)..(1121): n is a, c, g, or t
  misc_feature (1126)..(1126): n is a, c, g, or t
  misc_feature (1128)..(1128): n is a, c, g, or t
  misc_feature (1138)..(1138): n is a, c, g, or t
  misc_feature (1143)..(1144): n is a, c, g, or t
  misc_feature (1147)..(1147): n is a, c, g, or t
  misc_feature (1149)..(1149): n is a, c, g, or t
  misc_feature (1152)..(1152): n is a, c, g, or t
  misc_feature (1154)..(1154): n is a, c, g, or t
  misc_feature (1161)..(1161): n is a, c, g, or t
  misc_feature (1171)..(1171): n is a, c, g, or t
  misc_feature (1174)..(1174): n is a, c, g, or t
  misc_feature (1177)..(1177): n is a, c, g, or t
  misc_feature (1181)..(1182): n is a, c, g, or t
  misc_feature (1184)..(1184): n is a, c, g, or t
  misc_feature (1187)..(1188): n is a, c, g, or t
  misc_feature (1196)..(1196): n is a, c, g, or t
  misc_feature (1202)..(1206): n is a, c, g, or t
  misc_feature (1208)..(1210): n is a, c, g, or t
  misc_feature (1215)..(1216): n is a, c, g, or t
  misc_feature (1218)..(1218): n is a, c, g, or t
  misc_feature (1223)..(1223): n is a, c, g, or t
  misc_feature (1230)..(1230): n is a, c, g, or t
  misc_feature (1232)..(1232): n is a, c, g, or t
  misc_feature (1236)..(1236): n is a, c, g, or t
  misc_feature (1242)..(1242): n is a, c, g, or t
  misc_feature (1245)..(1245): n is a, c, g, or t
  misc_feature (1249)..(1251): n is a, c, g, or t
  misc_feature (1254)..(1259): n is a, c, g, or t
  misc_feature (1271)..(1271): n is a, c, g, or t
  misc_feature (1273)..(1273): n is a, c, g, or t
  misc_feature (1275)..(1275): n is a, c, g, or t
  misc_feature (1278)..(1282): n is a, c, g, or t
  misc_feature (1284)..(1284): n is a, c, g, or t
  misc_feature (1286)..(1286): n is a, c, g, or t
  misc_feature (1291)..(1291): n is a, c, g, or t
  misc_feature (1300)..(1300): n is a, c, g, or t
  misc_feature (1304)..(1304): n is a, c, g, or t
  misc_feature (1307)..(1307): n is a, c, g, or t
  misc_feature (1312)..(1313): n is a, c, g, or t
  misc_feature (1316)..(1316): n is a, c, g, or t
  misc_feature (1322)..(1322): n is a, c, g, or t
  misc_feature (1325)..(1325): n is a, c, g, or t
  misc_feature (1328)..(1328): n is a, c, g, or t
  misc_feature (1330)..(1332): n is a, c, g, or t
  misc_feature (1335)..(1335): n is a, c, g, or t
  misc_feature (1341)..(1341): n is a, c, g, or t
  misc_feature (1347)..(1347): n is a, c, g, or t
  misc_feature (1350)..(1350): n is a, c, g, or t
tagagaaattactatgagaggatcgcatcaccatcaccatcacggatcctatttaggtgacactatagaatcgtcgacccacgcgtccggtttcattgtgggancattacaactgtgggctccnagtcanatgcagcagatccgcatgtcccttcncgggaaggctgnggtgctgangggcannaacaccatgatgcgcaaggccatccgagggcacctggaaaacaacccagctctggagaaactgctgcctcatatccgggggaatgngggctttgtgntcaccaaggaggacctcactganatcagggacntgttgctggccnataaggtgccagctgctgcccgtgctggtgncnttgccccatgtgaagtcnctgtgccagcccanaacnctggtctcgggcccnanaanacctcctttttccaggctttaggtatcaccactaaaatctccaggggcaccattgaaatcctgagtgatgtgcagctgatcaagactggagacaaagtgggagccagcnaanccacgctgctgaacatgctcaacatctcccccttctcctttgggctggtcatccagcaggtgttcgacaatggcagcatctacaaccctgaagtgcttgatatcacagaggaaactctgcattctcgcttcctgganggtgtccgcaatgttgccagtgnctgtctgcagattgnctacncaactgttgcatcnntaccccattctatcatcaacgggtacaaacgagtcctgnncttgtctgtggaaacngatnacaccttccnacttgctgaaaaagtcaaggccttncntggctgatccatctgcctttgtggctagctgcccctgtnactgctgccanaananctgnttcctgctgctgnngnaancccanctaaaggtngaaacccnaagaaaaaatccgaaggaatcngaacnaagnatatgggaatttgggncncctttnactaaatccccccanaaannaaccctactttaacccngtttttantttgccnaaacaaagnaaaatnaagggcttaacttctttnaaaaaaaaaaaaaanaangggcggnccgccncccnnnangggggnnnnaatttattttnaanttaancnaaaccctggnacccnnggngnaananttcccgnaatggaaccnccnaantccnntnggnnattttttncaaaannnnncnnnggccnncnggggnttttttntngggnaaaacnaantttnnngtnnnnnnaaatttttgggncntnggnnnnnananggggnaaaaatccngggnaanccccnnttnaaaatnccnaangnnnccnaaaaantttttnggnt

SEQ ID NO: 633 - DNA, 1200 bp, Homo Sapiens
  misc_feature (1)..(1): n is a, c, g, or t
  misc_feature (854)..(854): n is a, c, g, or t
  misc_feature (928)..(928): n is a, c, g, or t
  misc_feature (1010)..(1010): n is a, c, g, or t
  misc_feature (1020)..(1020): n is a, c, g, or t
  misc_feature (1067)..(1067): n is a, c, g, or t
  misc_feature (1071)..(1071): n is a, c, g, or t
  misc_feature (1074)..(1074): n is a, c, g, or t
  misc_feature (1083)..(1083): n is a, c, g, or t
  misc_feature (1089)..(1089): n is a, c, g, or t
  misc_feature (1091)..(1091): n is a, c, g, or t
  misc_feature (1093)..(1093): n is a, c, g, or t
  misc_feature (1096)..(1096): n is a, c, g, or t
  misc_feature (1111)..(1111): n is a, c, g, or t
  misc_feature (1121)..(1121): n is a, c, g, or t
  misc_feature (1148)..(1148): n is a, c, g, or t
  misc_feature (1150)..(1150): n is a, c, g, or t
  misc_feature (1163)..(1166): n is a, c, g, or t
  misc_feature (1175)..(1175): n is a, c, g, or t
  misc_feature (1181)..(1183): n is a, c, g, or t
  misc_feature (1185)..(1185): n is a, c, g, or t
  misc_feature (1190)..(1190): n is a, c, g, or t
nagagaaattactatgagaggatcgcatcaccatcaccatcacggatcctatttaggtgacactatagaatcgtcgacccacgcgtccggcgggctactgggctgcggagaccagagcccggctccactgaagaaacccgccggctgctggggcagggcggcgaaaggtcagtcggccgagaggagtccgtggagccaccgtttcatagcctcagggaaaggatcgggcgtgctcacgagccctctaacccatggcttaaacacccgcttcctaagcctggttcctgaatatatcacatgtggtgataaacatgaagatgtatgaaaaattgtgttcgttgagagaaaatggaaggcttttcattctacttccacattttcattccagcagcttttctgttttggaagatgagtactgaatcttgcaatgaaatttttttaacttaaacaagacaaggaaaatgaagcgcagagacgttaaataactctctcaaggtcatgcagctgagaagagatgagacttgaactccagtgccagccctgttaatcactattctatggaatgatagggtatgcataaatgttcatgtgggctctggagtataccaggaactgaagtaaggtacatggacgtcttgaatattgtaactgagatgggcaagcctacacctttgcaaataaaggaggattgggaaagattaagatcctgttaaacgtcagtgttactatttagcctttgatatctccagtaaaggcaacttctttctggacccagaaataaagctttacattagcagcttccataacaccaataacatgaatgaccatctactgagcaattgcagtgcaccagnattatggcttatgagcactttatgtttattatctcacaactcactgagttagatactctccacaacccagtganaatgattgagtctcaaaattgttctttaatcctcagtatttccattaaaaaaagcttctatcaagtgcttcaaagtacccantgtgaaggantaaaatgactccctgctgcctctcaagcctgggaaaaatccctttcncttntgnatcttgganccccgncnantcnttattgaaaaaaccngccgcccgcntttggccttaggtgccatttacttggnantcccaaacggggnnnnccaagaacntttatnnntnttcgnaaaaaaattc

SEQ ID NO: 634 - DNA, 1422 bp, Homo Sapiens
  misc_feature (572)..(572): n is a, c, g, or t
  misc_feature (622)..(622): n is a, c, g, or t
  misc_feature (624)..(624): n is a, c, g, or t
  misc_feature (636)..(636): n is a, c, g, or t
  misc_feature (657)..(657): n is a, c, g, or t
  misc_feature (686)..(686): n is a, c, g, or t
  misc_feature (691)..(691): n is a, c, g, or t
  misc_feature (697)..(697): n is a, c, g, or t
  misc_feature (706)..(706): n is a, c, g, or t
  misc_feature (710)..(710): n is a, c, g, or t
  misc_feature (715)..(715): n is a, c, g, or t
  misc_feature (726)..(726): n is a, c, g, or t
  misc_feature (733)..(733): n is a, c, g, or t
  misc_feature (735)..(735): n is a, c, g, or t
  misc_feature (746)..(746): n is a, c, g, or t
  misc_feature (748)..(748): n is a, c, g, or t
  misc_feature (755)..(755): n is a, c, g, or t
  misc_feature (760)..(760): n is a, c, g, or t
  misc_feature (768)..(769): n is a, c, g, or t
  misc_feature (779)..(780): n is a, c, g, or t
  misc_feature (788)..(788): n is a, c, g, or t
  misc_feature (792)..(792): n is a, c, g, or t
  misc_feature (805)..(805): n is a, c, g, or t
  misc_feature (811)..(811): n is a, c, g, or t
  misc_feature (813)..(814): n is a, c, g, or t
  misc_feature (818)..(820): n is a, c, g, or t
  misc_feature (823)..(823): n is a, c, g, or t
  misc_feature (837)..(837): n is a, c, g, or t
  misc_feature (839)..(839): n is a, c, g, or t
  misc_feature (846)..(847): n is a, c, g, or t
  misc_feature (858)..(860): n is a, c, g, or t
  misc_feature (866)..(867): n is a, c, g, or t
  misc_feature (869)..(869): n is a, c, g, or t
  misc_feature (875)..(875): n is a, c, g, or t
  misc_feature (883)..(883): n is a, c, g, or t
  misc_feature (886)..(889): n is a, c, g, or t
  misc_feature (891)..(891): n is a, c, g, or t
  misc_feature (896)..(896): n is a, c, g, or t
  misc_feature (903)..(903): n is a, c, g, or t
  misc_feature (906)..(907): n is a, c, g, or t
  misc_feature (909)..(909): n is a, c, g, or t
  misc_feature (921)..(921): n is a, c, g, or t
  misc_feature (925)..(926): n is a, c, g, or t
  misc_feature (932)..(933): n is a, c, g, or t
  misc_feature (944)..(945): n is a, c, g, or t
  misc_feature (948)..(948): n is a, c, g, or t
  misc_feature (950)..(950): n is a, c, g, or t
  misc_feature (953)..(953): n is a, c, g, or t
  misc_feature (958)..(961): n is a, c, g, or t
  misc_feature (965)..(966): n is a, c, g, or t
  misc_feature (975)..(975): n is a, c, g, or t
  misc_feature (977)..(977): n is a, c, g, or t
  misc_feature (979)..(979): n is a, c, g, or t
  misc_feature (982)..(982): n is a, c, g, or t
  misc_feature (986)..(986): n is a, c, g, or t
  misc_feature (993)..(993): n is a, c, g, or t
  misc_feature (996)..(998): n is a, c, g, or t
  misc_feature (1004)..(1004): n is a, c, g, or t
  misc_feature (1006)..(1006): n is a, c, g, or t
  misc_feature (1008)..(1011): n is a, c, g, or t
  misc_feature (1016)..(1016): n is a, c, g, or t
  misc_feature (1020)..(1020): n is a, c, g, or t
  misc_feature (1022)..(1022): n is a, c, g, or t
  misc_feature (1024)..(1024): n is a, c, g, or t
  misc_feature (1030)..(1031): n is a, c, g, or t
  misc_feature (1035)..(1035): n is a, c, g, or t
  misc_feature (1037)..(1038): n is a, c, g, or t
  misc_feature (1047)..(1047): n is a, c, g, or t
  misc_feature (1050)..(1052): n is a, c, g, or t
  misc_feature (1058)..(1058): n is a, c, g, or t
  misc_feature (1060)..(1060): n is a, c, g, or t
  misc_feature (1067)..(1068): n is a, c, g, or t
  misc_feature (1071)..(1071): n is a, c, g, or t
  misc_feature (1073)..(1073): n is a, c, g, or t
  misc_feature (1080)..(1080): n is a, c, g, or t
  misc_feature (1086)..(1087): n is a, c, g, or t
  misc_feature (1090)..(1090): n is a, c, g, or t
  misc_feature (1094)..(1094): n is a, c, g, or t
  misc_feature (1097)..(1097): n is a, c, g, or t
  misc_feature (1102)..(1104): n is a, c, g, or t
  misc_feature (1108)..(1108): n is a, c, g, or t
  misc_feature (1110)..(1110): n is a, c, g, or t
  misc_feature (1113)..(1114): n is a, c, g, or t
  misc_feature (1116)..(1116): n is a, c, g, or t
  misc_feature (1119)..(1119): n is a, c, g, or t
  misc_feature (1124)..(1126): n is a, c, g, or t
  misc_feature (1130)..(1130): n is a, c, g, or t
  misc_feature (1133)..(1136): n is a, c, g, or t
  misc_feature (1138)..(1138): n is a, c, g, or t
  misc_feature (1143)..(1143): n is a, c, g, or t
  misc_feature (1151)..(1152): n is a, c, g, or t
  misc_feature (1155)..(1155): n is a, c, g, or t
  misc_feature (1157)..(1157): n is a, c, g, or t
  misc_feature (1159)..(1160): n is a, c, g, or t
  misc_feature (1163)..(1164): n is a, c, g, or t
  misc_feature (1168)..(1169): n is a, c, g, or t
  misc_feature (1175)..(1177): n is a, c, g, or t
  misc_feature (1179)..(1179): n is a, c, g, or t
  misc_feature (1181)..(1182): n is a, c, g, or t
  misc_feature (1186)..(1189): n is a, c, g, or t
  misc_feature (1192)..(1192): n is a, c, g, or t
  misc_feature (1194)..(1194): n is a, c, g, or t
  misc_feature (1196)..(1196): n is a, c, g, or t
  misc_feature (1198)..(1198): n is a, c, g, or t
  misc_feature (1200)..(1200): n is a, c, g, or t
  misc_feature (1202)..(1204): n is a, c, g, or t
  misc_feature (1208)..(1208): n is a, c, g, or t
  misc_feature (1210)..(1210): n is a, c, g, or t
  misc_feature (1212)..(1212): n is a, c, g, or t
  misc_feature (1214)..(1214): n is a, c, g, or t
  misc_feature (1217)..(1217): n is a, c, g, or t
  misc_feature (1220)..(1223): n is a, c, g, or t
  misc_feature (1225)..(1225): n is a, c, g, or t
  misc_feature (1227)..(1228): n is a, c, g, or t
  misc_feature (1231)..(1232): n is a, c, g, or t
  misc_feature (1236)..(1236): n is a, c, g, or t
  misc_feature (1239)..(1242): n is a, c, g, or t
  misc_feature (1244)..(1244): n is a, c, g, or t
  misc_feature (1246)..(1247): n is a, c, g, or t
  misc_feature (1250)..(1250): n is a, c, g, or t
  misc_feature (1253)..(1254): n is a, c, g, or t
  misc_feature (1256)..(1256): n is a, c, g, or t
  misc_feature (1258)..(1258): n is a, c, g, or t
  misc_feature (1260)..(1262): n is a, c, g, or t
  misc_feature (1264)..(1264): n is a, c, g, or t
  misc_feature (1266)..(1269): n is a, c, g, or t
  misc_feature (1272)..(1272): n is a, c, g, or t
  misc_feature (1283)..(1283): n is a, c, g, or t
  misc_feature (1285)..(1286): n is a, c, g, or t
  misc_feature (1288)..(1289): n is a, c, g, or t
  misc_feature (1292)..(1292): n is a, c, g, or t
  misc_feature (1294)..(1294): n is a, c, g, or t
  misc_feature (1299)..(1299): n is a, c, g, or t
  misc_feature (1301)..(1303): n is a, c, g, or t
  misc_feature (1305)..(1305): n is a, c, g, or t
  misc_feature (1308)..(1308): n is a, c, g, or t
  misc_feature (1310)..(1310): n is a, c, g, or t
  misc_feature (1314)..(1314): n is a, c, g, or t
  misc_feature (1319)..(1319): n is a, c, g, or t
  misc_feature (1325)..(1329): n is a, c, g, or t
  misc_feature (1331)..(1331): n is a, c, g, or t
  misc_feature (1335)..(1335): n is a, c, g, or t
  misc_feature (1337)..(1337): n is a, c, g, or t
  misc_feature (1339)..(1339): n is a, c, g, or t
  misc_feature (1341)..(1341): n is a, c, g, or t
  misc_feature (1343)..(1343): n is a, c, g, or t
  misc_feature (1345)..(1345): n is a, c, g, or t
  misc_feature (1351)..(1351): n is a, c, g, or t
  misc_feature (1355)..(1355): n is a, c, g, or t
  misc_feature (1360)..(1360): n is a, c, g, or t
  misc_feature (1363)..(1364): n is a, c, g, or t
  misc_feature (1366)..(1366): n is a, c, g, or t
  misc_feature (1368)..(1369): n is a, c, g, or t
  misc_feature (1371)..(1374): n is a, c, g, or t
  misc_feature (1377)..(1377): n is a, c, g, or t
  misc_feature (1381)..(1384): n is a, c, g, or t
  misc_feature (1386)..(1386): n is a, c, g, or t
  misc_feature (1388)..(1395): n is a, c, g, or t
  misc_feature (1398)..(1398): n is a, c, g, or t
  misc_feature (1400)..(1400): n is a, c, g, or t
  misc_feature (1403)..(1407): n is a, c, g, or t
  misc_feature (1410)..(1410): n is a, c, g, or t
  misc_feature (1412)..(1413): n is a, c, g, or t
  misc_feature (1418)..(1420): n is a, c, g, or t
  misc_feature (1422)..(1422): n is a, c, g, or t
tagagagattactatgagaggatcgcatcaccatcaccatcacggtatcctatttaggtgacactatagaatcgtcgacccacgcgtccgatcgctgcctacctggcctgccacgcggtgggcaacttccaggccccacctgcagagaagcccgcggccccggcccccgccaaggacgcgctgcgggccctgacgcagcggggccacgactcggtttatcagcagaataagtcggtgagcaccgacgagctggggcccccagggcggctggagggcgcgccccggcccgtggcccgcgagaagacctcgctgggcagcctgaagcgcgccagcgtggacgtggacctgctggccccgcgcagccccatggccaaggagaacatggtgaccttcagccacacgctgcccagggccagcgcgccctcgctggacgaccccgcgcgccgccacatgaccatccacgtgccgctggacgcctcgcgctccaagcagctcatcagcgagtggaagcagaatagcctggagggccgcggcctggggctgcccgacgacgccagccccgggcacctgcntgcgcccgccgaacccatggcggaggaggaggaagaggaggaggacgaanangaagaggaggangaggaagaggaggaggacganggcccggccccgccctcgctctaccccancgtgnaggcgnggccggggntggngcctnggttcatcctnccaaccncncgcggggccgncnccgctgntgcanattccctnnaggagggcgnntaggcgantgcngggtttgtccccnaaaatngnngccnnnttncacgccatttggtntnatgattnncaaaaaaaaannnggctgnnanttgtanaaaccctnctnnnncntgctnaaagttnatnncnaatgtccaaagntttnnggtttnnccaggaccctnntgntnacnaaaannnntttnnttattaaantncnatnttanaaatttntcnnnaaaaantntnnnnttttnaaantntnaatacnncaanannttttaaatnatnnntatttntnttttttnnaananttttttntttatnntantttntanatttnnntctntntanntnaanaaatnnntttnttnnnntnatttntatatttnnttnananntcnnatannaatttnnnananntttnnnnttnananantntnnntaanantntnttnttnnnntnannttnnaaanatnnnntnannatnttnntntntnnnantnnnnttnatataatatananntnntantnattantnnnanttntntatntattntttaannnnntnaaantnanananantaattntaanttttnatnntnannannnnttnaaannnnanannnnnnnnaantnttnnnnntantnnttttnnnan

SEQ ID NO: 635 - DNA, 1479 bp, Homo Sapiens
  misc_feature (33)..(33): n is a, c, g, or t
  misc_feature (49)..(49): n is a, c, g, or t
  misc_feature (107)..(107): n is a, c, g, or t
  misc_feature (135)..(135): n is a, c, g, or t
  misc_feature (355)..(355): n is a, c, g, or t
  misc_feature (801)..(801): n is a, c, g, or t
  misc_feature (830)..(830): n is a, c, g, or t
  misc_feature (850)..(850): n is a, c, g, or t
  misc_feature (869)..(869): n is a, c, g, or t
  misc_feature (889)..(889): n is a, c, g, or t
  misc_feature (907)..(907): n is a, c, g, or t
  misc_feature (926)..(926): n is a, c, g, or t
  misc_feature (928)..(928): n is a, c, g, or t
  misc_feature (932)..(932): n is a, c, g, or t
  misc_feature (940)..(940): n is a, c, g, or t
  misc_feature (949)..(949): n is a, c, g, or t
  misc_feature (960)..(960): n is a, c, g, or t
  misc_feature (963)..(963): n is a, c, g, or t
  misc_feature (968)..(968): n is a, c, g, or t
  misc_feature (981)..(981): n is a, c, g, or t
  misc_feature (984)..(984): n is a, c, g, or t
  misc_feature (992)..(992): n is a, c, g, or t
  misc_feature (996)..(996): n is a, c, g, or t
  misc_feature (1002)..(1002): n is a, c, g, or t
  misc_feature (1012)..(1013): n is a, c, g, or t
  misc_feature (1016)..(1016): n is a, c, g, or t
  misc_feature (1029)..(1029): n is a, c, g, or t
  misc_feature (1033)..(1033): n is a, c, g, or t
  misc_feature (1035)..(1035): n is a, c, g, or t
  misc_feature (1038)..(1039): n is a, c, g, or t
  misc_feature (1046)..(1046): n is a, c, g, or t
  misc_feature (1089)..(1089): n is a, c, g, or t
  misc_feature (1091)..(1091): n is a, c, g, or t
  misc_feature (1094)..(1094): n is a, c, g, or t
  misc_feature (1098)..(1098): n is a, c, g, or t
  misc_feature (1100)..(1100): n is a, c, g, or t
  misc_feature (1105)..(1106): n is a, c, g, or t
  misc_feature (1112)..(1112): n is a, c, g, or t
  misc_feature (1114)..(1114): n is a, c, g, or t
  misc_feature (1120)..(1120): n is a, c, g, or t
  misc_feature (1127)..(1127): n is a, c, g, or t
  misc_feature (1138)..(1138): n is a, c, g, or t
  misc_feature (1145)..(1146): n is a, c, g, or t
  misc_feature (1154)..(1154): n is a, c, g, or t
  misc_feature (1162)..(1162): n is a, c, g, or t
  misc_feature (1176)..(1176): n is a, c, g, or t
  misc_feature (1186)..(1186): n is a, c, g, or t
  misc_feature (1199)..(1199): n is a, c, g, or t
  misc_feature (1202)..(1202): n is a, c, g, or t
  misc_feature (1208)..(1208): n is a, c, g, or t
  misc_feature (1217)..(1217): n is a, c, g, or t
  misc_feature (1220)..(1220): n is a, c, g, or t
  misc_feature (1223)..(1223): n is a, c, g, or t
  misc_feature (1233)..(1233): n is a, c, g, or t
  misc_feature (1239)..(1239): n is a, c, g, or t
  misc_feature (1242)..(1242): n is a, c, g, or t
  misc_feature (1244)..(1244): n is a, c, g, or t
  misc_feature (1259)..(1259): n is a, c, g, or t
  misc_feature (1265)..(1265): n is a, c, g, or t
  misc_feature (1269)..(1269): n is a, c, g, or t
  misc_feature (1273)..(1273): n is a, c, g, or t
  misc_feature (1276)..(1277): n is a, c, g, or t
  misc_feature (1281)..(1281): n is a, c, g, or t
  misc_feature (1289)..(1289): n is a, c, g, or t
  misc_feature (1292)..(1292): n is a, c, g, or t
  misc_feature (1294)..(1294): n is a, c, g, or t
  misc_feature (1299)..(1299): n is a, c, g, or t
  misc_feature (1301)..(1301): n is a, c, g, or t
  misc_feature (1304)..(1304): n is a, c, g, or t
  misc_feature (1311)..(1311): n is a, c, g, or t
  misc_feature (1315)..(1315): n is a, c, g, or t
  misc_feature (1324)..(1324): n is a, c, g, or t
  misc_feature (1341)..(1341): n is a, c, g, or t
  misc_feature (1356)..(1356): n is a, c, g, or t
  misc_feature (1362)..(1362): n is a, c, g, or t
  misc_feature (1365)..(1365): n is a, c, g, or t
  misc_feature (1368)..(1368): n is a, c, g, or t
  misc_feature (1374)..(1374): n is a, c, g, or t
  misc_feature (1385)..(1385): n is a, c, g, or t
  misc_feature (1389)..(1390): n is a, c, g, or t
  misc_feature (1395)..(1395): n is a, c, g, or t
  misc_feature (1398)..(1398): n is a, c, g, or t
  misc_feature (1403)..(1403): n is a, c, g, or t
  misc_feature (1411)..(1411): n is a, c, g, or t
  misc_feature (1414)..(1414): n is a, c, g, or t
  misc_feature (1419)..(1419): n is a, c, g, or t
  misc_feature (1421)..(1421): n is a, c, g, or t
  misc_feature (1432)..(1432): n is a, c, g, or t
  misc_feature (1443)..(1444): n is a, c, g, or t
  misc_feature (1452)..(1452): n is a, c, g, or t
  misc_feature (1456)..(1457): n is a, c, g, or t
  misc_feature (1459)..(1459): n is a, c, g, or t
  misc_feature (1473)..(1473): n is a, c, g, or t
  misc_feature (1477)..(1478): n is a, c, g, or t
gatagagagaattactatgagaggatcgcatcnccatcaccatcacggntcctatttagtgtgacactatagaatcgtcgacccacgcgctccgagcccaacatggngatgcacaacaaggcggcgccgccgcanatcccggacacccggcgggagctggcggagctcgtgaagcggaagcaggagctggcggaaacattggcaaatttggagcgacagatctatgcttttgagggaagctacctggaagacactcagatgtatggcaatattattcgtggctgggatcggtatctgaccaaccaaaaaaactccaatagcaaaaatgatcgaaggaaccggaagtttaaggaanctgagcggctcttcagtaaatcctcggttacctcagcagctgcagtaagtgcattggcaggagttcaggaccagctcattgaaaagagggagccaggaagtgggacggaaagtgacacttctccagacttccacaatcaggaaaatgagcccagccaggaggaccctgaggatctggatggatctgtgcagggagtgaaacctcagaaggctgcttcttctacttcctcagggagtcaccacagcagccataaaaagcgaaagaataaaaaccggcacagcccgtctggcatgtttgattatgactttgagattgatctgaagttaaacaaaaaaccacgagctgactattagaagacacattagtgcagaagcttccaggctgtagagccctgcttcccttctctgacctcacaaagataaaacatccttcacctgagttcgtgnccatccacctctgctctcccaagacccantggcctgtgactttgagtanttttgttctaaatgtggtngacaaacaagttcatttctngtaaaacattgggtcttnacttttatgtcatttttantnacanaactgcangaaaatcanacaatgttgtnatncccgncaagttgcctaantgngcgtttcncccnttcttnaaatgaatgnnctnccccaaaactggnctgncnccnnccttctnctgtgaatacccttccaaaaaaagtttccctggttttgttttntnctnaaantnaaaanncaaatncncatttncaaaggnggctggaaaanatccggnnattttctnaaaatggnttaaggttccctgnttttccccgngggattttaaccnaanttcctnggggatttnttnaangccttttaancccaanttncnggaaaaaatgaaaancctttntggngttncannattnaatggaanaancngtttntnaanaaaaggnaaanttccttctnttttaggggaaaaaagntaaaattccctctantcttcnatnggngaaatnttttcgacagnaagnnaaaanatnaaccncctttaanctnttttntnataaattcgcnctaaaaaatanncatccatnatannanactgggctcctccntttnnt

SEQ ID NO: 636 - DNA, 1200 bp, Homo Sapiens
  misc_feature (2)..(2): n is a, c, g, or t
  misc_feature (682)..(682): n is a, c, g, or t
  misc_feature (725)..(725): n is a, c, g, or t
  misc_feature (783)..(783): n is a, c, g, or t
  misc_feature (808)..(808): n is a, c, g, or t
  misc_feature (812)..(812): n is a, c, g, or t
  misc_feature (818)..(818): n is a, c, g, or t
  misc_feature (836)..(836): n is a, c, g, or t
  misc_feature (849)..(849): n is a, c, g, or t
  misc_feature (857)..(857): n is a, c, g, or t
  misc_feature (860)..(860): n is a, c, g, or t
  misc_feature (893)..(893): n is a, c, g, or t
  misc_feature (895)..(895): n is a, c, g, or t
  misc_feature (897)..(897): n is a, c, g, or t
  misc_feature (899)..(899): n is a, c, g, or t
  misc_feature (907)..(908): n is a, c, g, or t
  misc_feature (916)..(916): n is a, c, g, or t
  misc_feature (926)..(927): n is a, c, g, or t
  misc_feature (929)..(929): n is a, c, g, or t
  misc_feature (933)..(933): n is a, c, g, or t
  misc_feature (935)..(936): n is a, c, g, or t
  misc_feature (939)..(939): n is a, c, g, or t
  misc_feature (942)..(944): n is a, c, g, or t
  misc_feature (946)..(947): n is a, c, g, or t
  misc_feature (963)..(964): n is a, c, g, or t
  misc_feature (969)..(969): n is a, c, g, or t
  misc_feature (971)..(971): n is a, c, g, or t
  misc_feature (976)..(976): n is a, c, g, or t
  misc_feature (979)..(982): n is a, c, g, or t
  misc_feature (984)..(984): n is a, c, g, or t
  misc_feature (986)..(986): n is a, c, g, or t
  misc_feature (988)..(991): n is a, c, g, or t
  misc_feature (996)..(996): n is a, c, g, or t
  misc_feature (998)..(999): n is a, c, g, or t
  misc_feature (1002)..(1003): n is a, c, g, or t
  misc_feature (1008)..(1008): n is a, c, g, or t
  misc_feature (1010)..(1010): n is a, c, g, or t
  misc_feature (1014)..(1014): n is a, c, g, or t
  misc_feature (1017)..(1017): n is a, c, g, or t
  misc_feature (1022)..(1022): n is a, c, g, or t
  misc_feature (1024)..(1024): n is a, c, g, or t
  misc_feature (1027)..(1030): n is a, c, g, or t
  misc_feature (1044)..(1046): n is a, c, g, or t
  misc_feature (1049)..(1050): n is a, c, g, or t
  misc_feature (1055)..(1055): n is a, c, g, or t
  misc_feature (1059)..(1059): n is a, c, g, or t
  misc_feature (1061)..(1061): n is a, c, g, or t
  misc_feature (1070)..(1071): n is a, c, g, or t
  misc_feature (1073)..(1075): n is a, c, g, or t
  misc_feature (1077)..(1077): n is a, c, g, or t
  misc_feature (1081)..(1082): n is a, c, g, or t
  misc_feature (1088)..(1088): n is a, c, g, or t
  misc_feature (1092)..(1094): n is a, c, g, or t
  misc_feature (1097)..(1099): n is a, c, g, or t
  misc_feature (1107)..(1107): n is a, c, g, or t
  misc_feature (1110)..(1110): n is a, c, g, or t
  misc_feature (1129)..(1130): n is a, c, g, or t
  misc_feature (1150)..(1150): n is a, c, g, or t
  misc_feature (1154)..(1154): n is a, c, g, or t
  misc_feature (1165)..(1165): n is a, c, g, or t
  misc_feature (1168)..(1168): n is a, c, g, or t
  misc_feature (1170)..(1170): n is a, c, g, or t
  misc_feature (1180)..(1180): n is a, c, g, or t
  misc_feature (1185)..(1185): n is a, c, g, or t
  misc_feature (1187)..(1187): n is a, c, g, or t
  misc_feature (1190)..(1190): n is a, c, g, or t
  misc_feature (1194)..(1196): n is a, c, g, or t
tngagagattactatgagaggatcgcatcaccattcaccatcacggatcctatttaggtgacactatagaatcgtcgacccacgcgatccggacccaccccgagcagccaggctccgaggccagcacacagcccatcgccgggacccagacagtgccgcagacagacgaggcggcacagacggacagccagccgctccacccctccgaccctacagagaagcagcagcccaagcggctacacgtctccaacatccccttccggttcagggaccccgacttgcggcaaatgttcgggcaattcggaaaaattttagacgtggagatcatttttaacgagcggggctccaagggttttgggtttgtaacttttgaaactagctcagatgctgaccgagcccgggagaagctgaatgggacgatcgtagagggacggaaaattgaggtcaataatgccacggcccgagtgatgaccaacaagaagacggggaacccctacaccaacggctggaagctaaatccagtggtcggcgcagtctacgggcctgaattctatgcagtgacggggttcccctaccccaccaccggcacagccgttgcctaccggggcgcacatcttcggggccggggccgggccgtgtataatacatttcgggctgcgccacccccaccccccatcccganttacggagcggtcgtgtatcaggatggattttatggtgctganatttatgggaggctacgcagccctacagatacgctcagcccgctgcagcggcggcagnctacagcgacagttacggcagagtntacncagctngccgaacccgtaccatcncaccattcggggnccgcgggngancttacagcattggaaaccatgttgaaaaccttncncngntttctttnntcggaccntgaggggccnnancccnannaanatnnntnnaatatataattatatnntatananattanttnnnntnantnnnntttanannttnntattnangggnggnccccntnccnnnngggagcccaattannnttnnattanctgnantttggactnncnnntnaatnntcccanaaannnccnnnaaactccnttnggatttttttcaaaacccnngtttccccccggtttttttnattnggaaaaatccnacncntttgggaganttttntnggntttnnnattt

SEQ ID NO: 637 - DNA, 1407 bp, Homo Sapiens
  misc_feature (68)..(68): n is a, c, g, or t
  misc_feature (76)..(76): n is a, c, g, or t
  misc_feature (383)..(383): n is a, c, g, or t
  misc_feature (475)..(475): n is a, c, g, or t
  misc_feature (635)..(635): n is a, c, g, or t
  misc_feature (799)..(799): n is a, c, g, or t
  misc_feature (805)..(805): n is a, c, g, or t
  misc_feature (836)..(836): n is a, c, g, or t
  misc_feature (849)..(849): n is a, c, g, or t
  misc_feature (853)..(853): n is a, c, g, or t
  misc_feature (866)..(866): n is a, c, g, or t
  misc_feature (880)..(880): n is a, c, g, or t
  misc_feature (886)..(886): n is a, c, g, or t
  misc_feature (908)..(908): n is a, c, g, or t
  misc_feature (917)..(917): n is a, c, g, or t
  misc_feature (925)..(925): n is a, c, g, or t
  misc_feature (928)..(928): n is a, c, g, or t
  misc_feature (933)..(933): n is a, c, g, or t
  misc_feature (940)..(940): n is a, c, g, or t
  misc_feature (945)..(945): n is a, c, g, or t
  misc_feature (949)..(949): n is a, c, g, or t
  misc_feature (960)..(960): n is a, c, g, or t
  misc_feature (974)..(974): n is a, c, g, or t
  misc_feature (982)..(982): n is a, c, g, or t
  misc_feature (986)..(986): n is a, c, g, or t
  misc_feature (1012)..(1012): n is a, c, g, or t
  misc_feature (1020)..(1020): n is a, c, g, or t
  misc_feature (1022)..(1022): n is a, c, g, or t
  misc_feature (1027)..(1028): n is a, c, g, or t
  misc_feature (1045)..(1046): n is a, c, g, or t
  misc_feature (1056)..(1056): n is a, c, g, or t
  misc_feature (1059)..(1059): n is a, c, g, or t
  misc_feature (1068)..(1068): n is a, c, g, or t
  misc_feature (1072)..(1073): n is a, c, g, or t
  misc_feature (1078)..(1078): n is a, c, g, or t
  misc_feature (1085)..(1085): n is a, c, g, or t
  misc_feature (1090)..(1090): n is a, c, g, or t
  misc_feature (1094)..(1094): n is a, c, g, or t
  misc_feature (1098)..(1098): n is a, c, g, or t
  misc_feature (1108)..(1108): n is a, c, g, or t
  misc_feature (1114)..(1114): n is a, c, g, or t
  misc_feature (1118)..(1118): n is a, c, g, or t
  misc_feature (1120)..(1122): n is a, c, g, or t
  misc_feature (1128)..(1128): n is a, c, g, or t
  misc_feature (1136)..(1136): n is a, c, g, or t
  misc_feature (1140)..(1141): n is a, c, g, or t
  misc_feature (1149)..(1149): n is a, c, g, or t
  misc_feature (1152)..(1152): n is a, c, g, or t
  misc_feature (1171)..(1171): n is a, c, g, or t
  misc_feature (1178)..(1178): n is a, c, g, or t
  misc_feature (1180)..(1180): n is a, c, g, or t
  misc_feature (1182)..(1182): n is a, c, g, or t
  misc_feature (1185)..(1187): n is a, c, g, or t
  misc_feature (1190)..(1190): n is a, c, g, or t
  misc_feature (1195)..(1195): n is a, c, g, or t
  misc_feature (1197)..(1197): n is a, c, g, or t
  misc_feature (1204)..(1205): n is a, c, g, or t
  misc_feature (1209)..(1209): n is a, c, g, or t
  misc_feature (1225)..(1225): n is a, c, g, or t
  misc_feature (1230)..(1230): n is a, c, g, or t
  misc_feature (1234)..(1235): n is a, c, g, or t
  misc_feature (1244)..(1244): n is a, c, g, or t
  misc_feature (1246)..(1246): n is a, c, g, or t
  misc_feature (1248)..(1250): n is a, c, g, or t
  misc_feature (1255)..(1261): n is a, c, g, or t
  misc_feature (1263)..(1265): n is a, c, g, or t
  misc_feature (1269)..(1269): n is a, c, g, or t
  misc_feature (1274)..(1274): n is a, c, g, or t
  misc_feature (1281)..(1281): n is a, c, g, or t
  misc_feature (1286)..(1286): n is a, c, g, or t
  misc_feature (1295)..(1295): n is a, c, g, or t
  misc_feature (1301)..(1301): n is a, c, g, or t
  misc_feature (1304)..(1304): n is a, c, g, or t
  misc_feature (1315)..(1315): n is a, c, g, or t
  misc_feature (1319)..(1319): n is a, c, g, or t
  misc_feature (1323)..(1323): n is a, c, g, or t
  misc_feature (1330)..(1330): n is a, c, g, or t
  misc_feature (1337)..(1337): n is a, c, g, or t
  misc_feature (1346)..(1346): n is a, c, g, or t
  misc_feature (1349)..(1349): n is a, c, g, or t
  misc_feature (1353)..(1353): n is a, c, g, or t
  misc_feature (1361)..(1361): n is a, c, g, or t
  misc_feature (1365)..(1365): n is a, c, g, or t
  misc_feature (1368)..(1368): n is a, c, g, or t
  misc_feature (1372)..(1372): n is a, c, g, or t
  misc_feature (1376)..(1376): n is a, c, g, or t
  misc_feature (1378)..(1379): n is a, c, g, or t
  misc_feature (1385)..(1386): n is a, c, g, or t
  misc_feature (1392)..(1392): n is a, c, g, or t
  misc_feature (1394)..(1394): n is a, c, g, or t
  misc_feature (1397)..(1397): n is a, c, g, or t
  misc_feature (1399)..(1399): n is a, c, g, or t
  misc_feature (1402)..(1402): n is a, c, g, or t
tagagagattactatgagaggatcgcatcaccatcaccatcacggatcctatttaggtgacactatanaatcgtcnacccacgcgtccgggccgcctgcagccacggggacggagggagcagactgtggccatccaggccctgtgggccgggggcgccgaaagcctgcagatgaccttcctgggccgggccgcagtgctgggtcagttccagcaccccaacatcctgcggctggagggcgtggtcaccaagagccgacccctcatggtgctgacggagttcatggagcttggccccctggacagcttcctcaggcagcgggagggccagttcagcagcctgcagctggtggccatgcagcggggagtggctgctgccatgcantacctgtccagctttgccttcgtccatcgctcgctgtctgcccacagcgtgctggtgaatagccacttggtgtgcaaggtggcccgtcttgnccacagtcctcagggcccaagttgtttgcttcgctgggcagccccagaggtcattgcacatggaaagcatacaacatccagtgatgtctggagctttgggatactcatgtgggaagtgatgagttatggagaacggccttactgggacatgagtgagcangaggtactaaatgcaatagagcaggagttccggctgcccccgcctccaggctgtcctcctggattacatctacttatgttggacacttggcagaaggaccgtgcccggcggcctcatttttgaccagctggtggctgcatttgacaagatgatccgcaagccanaaaccntgcaagctggcgggaacccaaagggaaaagnccttcccaggccntttntgaacccctgtgnccctggacttttcnttgtcngggactcaccccaaagcctggnctttaaccnatttgaantgnaatgntaccagnacaantttntccaagtttgncctctgtacctttnaaagaaantggntcaacctcaacccaaaaaaaacttgnctgccctngnacatnnacccttggactggccannaaaaaaaaanttngttggaacnaatnncaaanttttttnaaaanaacntaangagaaaggtntcaatngaangnnntaaaanaaaaaatncccnnaaataaanctngaaaaatttttcaaaaagnaaatatngnanatnnntcnggctncnaacaccnnttgnaaaaaaatcccccaancaaanacanncttcccaangnannntttcnnnnnnntnnnattnccaanacacccnttttnttaaagganaaaaanaantttctattatnaaanaaantttttantatatanataatatcnaantatnatttaacngggnccnctcnatangnnacatannataaananttntnctncggga

SEQ ID NO: 638 - DNA, 1408 bp, Homo Sapiens
  misc_feature (614)..(614): n is a, c, g, or t
  misc_feature (878)..(878): n is a, c, g, or t
  misc_feature (905)..(905): n is a, c, g, or t
  misc_feature (912)..(912): n is a, c, g, or t
  misc_feature (915)..(915): n is a, c, g, or t
  misc_feature (922)..(922): n is a, c, g, or t
  misc_feature (927)..(927): n is a, c, g, or t
  misc_feature (935)..(935): n is a, c, g, or t
  misc_feature (976)..(977): n is a, c, g, or t
  misc_feature (982)..(987): n is a, c, g, or t
  misc_feature (989)..(992): n is a, c, g, or t
  misc_feature (994)..(994): n is a, c, g, or t
  misc_feature (996)..(1000): n is a, c, g, or t
  misc_feature (1002)..(1002): n is a, c, g, or t
  misc_feature (1004)..(1007): n is a, c, g, or t
  misc_feature (1009)..(1020): n is a, c, g, or t
  misc_feature (1022)..(1027): n is a, c, g, or t
  misc_feature (1029)..(1030): n is a, c, g, or t
  misc_feature (1032)..(1043): n is a, c, g, or t
  misc_feature (1045)..(1048): n is a, c, g, or t
  misc_feature (1050)..(1051): n is a, c, g, or t
  misc_feature (1053)..(1059): n is a, c, g, or t
  misc_feature (1079)..(1079): n is a, c, g, or t
  misc_feature (1082)..(1082): n is a, c, g, or t
  misc_feature (1084)..(1084): n is a, c, g, or t
  misc_feature (1087)..(1087): n is a, c, g, or t
  misc_feature (1094)..(1094): n is a, c, g, or t
  misc_feature (1096)..(1097): n is a, c, g, or t
  misc_feature (1100)..(1100): n is a, c, g, or t
  misc_feature (1105)..(1105): n is a, c, g, or t
  misc_feature (1116)..(1117): n is a, c, g, or t
  misc_feature (1119)..(1120): n is a, c, g, or t
  misc_feature (1126)..(1126): n is a, c, g, or t
  misc_feature (1129)..(1130): n is a, c, g, or t
  misc_feature (1135)..(1135): n is a, c, g, or t
  misc_feature (1144)..(1144): n is a, c, g, or t
  misc_feature (1147)..(1147): n is a, c, g, or t
  misc_feature (1149)..(1149): n is a, c, g, or t
  misc_feature (1162)..(1162): n is a, c, g, or t
  misc_feature (1165)..(1167): n is a, c, g, or t
  misc_feature (1187)..(1187): n is a, c, g, or t
  misc_feature (1199)..(1199): n is a, c, g, or t
  misc_feature (1201)..(1201): n is a, c, g, or t
  misc_feature (1205)..(1205): n is a, c, g, or t
  misc_feature (1208)..(1208): n is a, c, g, or t
  misc_feature (1210)..(1210): n is a, c, g, or t
  misc_feature (1217)..(1217): n is a, c, g, or t
  misc_feature (1219)..(1220): n is a, c, g, or t
  misc_feature (1224)..(1224): n is a, c, g, or t
  misc_feature (1226)..(1226): n is a, c, g, or t
  misc_feature (1240)..(1240): n is a, c, g, or t
  misc_feature (1245)..(1245): n is a, c, g, or t
  misc_feature (1256)..(1257): n is a, c, g, or t
  misc_feature (1264)..(1264): n is a, c, g, or t
  misc_feature (1267)..(1267): n is a, c, g, or t
  misc_feature (1273)..(1273): n is a, c, g, or t
  misc_feature (1278)..(1278): n is a, c, g, or t
  misc_feature (1280)..(1280): n is a, c, g, or t
  misc_feature (1284)..(1287): n is a, c, g, or t
  misc_feature (1289)..(1289): n is a, c, g, or t
  misc_feature (1292)..(1293): n is a, c, g, or t
  misc_feature (1298)..(1298): n is a, c, g, or t
  misc_feature (1300)..(1301): n is a, c, g, or t
  misc_feature (1303)..(1305): n is a, c, g, or t
  misc_feature (1308)..(1309): n is a, c, g, or t
  misc_feature (1312)..(1312): n is a, c, g, or t
  misc_feature (1326)..(1326): n is a, c, g, or t
  misc_feature (1338)..(1338): n is a, c, g, or t
  misc_feature (1343)..(1343): n is a, c, g, or t
  misc_feature (1345)..(1345): n is a, c, g, or t
  misc_feature (1349)..(1351): n is a, c, g, or t
  misc_feature (1353)..(1353): n is a, c, g, or t
  misc_feature (1357)..(1358): n is a, c, g, or t
  misc_feature (1373)..(1373): n is a, c, g, or t
  misc_feature (1375)..(1375): n is a, c, g, or t
  misc_feature (1381)..(1382): n is a, c, g, or t
  misc_feature (1388)..(1389): n is a, c, g, or t
  misc_feature (1396)..(1396): n is a, c, g, or t
  misc_feature (1400)..(1401): n is a, c, g, or t
  misc_feature (1404)..(1404): n is a, c, g, or t
  misc_feature (1406)..(1406): n is a, c, g, or t
tagagagattactatgagaggatcgcatcaccatcaccatcacggatcctatttaggtgacactatagaatcgtcgacccacgcgtccgctcagcttttacagcaaatcagccggcaccaggagcagttcatccagatgctgaacgagccccctggggagctggcggacatctcagatgtggagggggaggtgggcgccataggagaggaggccccgcagatgaactacatccaggtgacgccgcaggagaaagaagctatagagaggttgaaggccctgggcttcccagagagcctggtcatccaggcctatttcgcgtgtgaaaaaaatgagaacttggctgccaacttcctcctgagtcagaactttgatgacgagtgatgccaggaagccaggccaccgaagcccccaccctacccttattccatgaaagttttataaaagaaaaaatatatatatattcatgtttatttaagaaatggaaaaaaaaatcaaaaatcttaaaaaaacaagcaaacagtccagcttcctgtcctcctaaagtggcccctgttcccatctcccgggccagacagctgtccccccgtcctcctccccagcccagcctgctcanagaagctggcaggactgggaggcgacagatgggcccctcttggcctctgtcccagctctctgcagccagacggaaaggcggctgcttgcctctccatcctccgaaaaacccctgaggacccccccccatcctcttctaggatgaggggaagctggagccccaactttgatcctccattggagtggcccaaatcttttccatctagggcaagtcctgaaaggcccaaggccccctccccaagtctgggccttggcctccagcctngaagaagggctaaacatcagctcattntcaaggnccnccccccncccanaacaaaanccgtgtctctgataaaggttttgaatggaataaagtttttnnacctnnnnnnannnnanannnnnanannnnannnnnnnnnnnnannnnnnannannnnnnnnnnnnannnnannannnnnnngggggggcccccccccaaanggngnccnaataacntnnttnacggnacttggccccnntnnaaaaanccnnaaggncccccaacnccntntggttttttaaanccnnngttccccgggggtttttttnggggaaatcccncntttnggnantttgggncnnagancnaaggggaaaaaccnggganacccgttaaanncccgggnccnaaaaantttgngntttnnnntntcnngtatnannannntcnnggnatatcccttttaancaaaaaaaacanttttncntttnnntncccnnaagctcccatttttnanaaaaanngggttnnattcccntccnnttnanaa

SEQ ID NO: 639 - DNA, 1200 bp, Homo Sapiens
  misc_feature (910)..(910): n is a, c, g, or t
  misc_feature (917)..(917): n is a, c, g, or t
  misc_feature (924)..(924): n is a, c, g, or t
  misc_feature (926)..(926): n is a, c, g, or t
  misc_feature (934)..(934): n is a, c, g, or t
  misc_feature (937)..(937): n is a, c, g, or t
  misc_feature (947)..(947): n is a, c, g, or t
  misc_feature (988)..(988): n is a, c, g, or t
  misc_feature (1012)..(1012): n is a, c, g, or t
  misc_feature (1017)..(1017): n is a, c, g, or t
  misc_feature (1030)..(1030): n is a, c, g, or t
  misc_feature (1035)..(1035): n is a, c, g, or t
  misc_feature (1037)..(1037): n is a, c, g, or t
  misc_feature (1043)..(1043): n is a, c, g, or t
  misc_feature (1052)..(1052): n is a, c, g, or t
  misc_feature (1054)..(1054): n is a, c, g, or t
  misc_feature (1058)..(1058): n is a, c, g, or t
  misc_feature (1077)..(1077): n is a, c, g, or t
  misc_feature (1086)..(1086): n is a, c, g, or t
  misc_feature (1091)..(1091): n is a, c, g, or t
  misc_feature (1101)..(1101): n is a, c, g, or t
  misc_feature (1106)..(1106): n is a, c, g, or t
  misc_feature (1111)..(1111): n is a, c, g, or t
  misc_feature (1115)..(1115): n is a, c, g, or t
  misc_feature (1117)..(1118): n is a, c, g, or t
  misc_feature (1122)..(1122): n is a, c, g, or t
  misc_feature (1134)..(1134): n is a, c, g, or t
  misc_feature (1137)..(1137): n is a, c, g, or t
  misc_feature (1139)..(1139): n is a, c, g, or t
  misc_feature (1141)..(1142): n is a, c, g, or t
  misc_feature (1148)..(1148): n is a, c, g, or t
  misc_feature (1150)..(1151): n is a, c, g, or t
  misc_feature (1154)..(1155): n is a, c, g, or t
  misc_feature (1161)..(1162): n is a, c, g, or t
  misc_feature (1170)..(1170): n is a, c, g, or t
  misc_feature (1180)..(1180): n is a, c, g, or t
  misc_feature (1185)..(1185): n is a, c, g, or t
  misc_feature (1187)..(1187): n is a, c, g, or t
  misc_feature (1189)..(1189): n is a, c, g, or t
  misc_feature (1194)..(1195): n is a, c, g, or t
agagaaattactatgagaggatcgcatcaccatcaccatcacggatcctatttaggtgacactatagaatcgtcgacccacgcgtccggccaagaaggaggcccgcctgttacgatggtgtccatgagtttcaagcggaaccgcagtgaccggttctacagcacccggtgctgcggctgttgccatgtccgcaccgggacgatcatcctggggacctggtacatggtagtaaacctattgatggcaattttgctgactgtggaagtgactcatccaaactccatgccagctgtcaacattcagtatgaagtcatcggtaattactattcgtctgagagaatggctgataatgcctgtgttctttttgccgtctctgttcttatgtttataatcagttcaatgctggtttatggagcaatttcttatcaagtgggttggctgattccattcttctgttaccgactttttgacttcgtcctcagttgcctggttgctattagttctctcacctatttgccaagaatcaaagaatatctggatcaactacctgattttccctacaaagatgacctcctggccttggactccagctgcctcctgttcattgttcttgtgttctttgccttattcatcatttttaaggcttatctaattaactgtgtttggaactgctataaatacatcaacaaccgaaacgtgccggagattgctgtgtaccctgcctttgaagcacctcctcagtacgttttgccaacctatgaaatggccgtgaaaatgcctgaaaaagaaccaccacctccttacttacctgcctgaagaaattctgcctttgacaataaatcctataccagctttttgtttgtttatgttacagaatgctgcaattcagggctcttcaaacttgtttganaaaaaanatgttgncntttggttnaancatttatttncaacactaaggagcttttgacatctgttaaacgccttttgnttttttggtaagcctttacatttnaaaantttttgaaaaaanctagntnaacaanaacaaaggncnttgnttgcctttaattggggggngggaaaggnaaaanggaactgccnaaaanttccntttnanngccnttctttaaaaanccntngnnttttgnanntgnnacccgnnaactttcngaaaaagaantaaantncnggggnnaaaaa

SEQ ID NO: 640 - DNA, 1200 bp, Homo Sapiens
  misc_feature (35)..(35): n is a, c, g, or t
  misc_feature (63)..(63): n is a, c, g, or t
  misc_feature (799)..(799): n is a, c, g, or t
  misc_feature (845)..(845): n is a, c, g, or t
  misc_feature (849)..(849): n is a, c, g, or t
  misc_feature (959)..(959): n is a, c, g, or t
  misc_feature (993)..(993): n is a, c, g, or t
  misc_feature (1002)..(1003): n is a, c, g, or t
  misc_feature (1019)..(1019): n is a, c, g, or t
  misc_feature (1025)..(1025): n is a, c, g, or t
  misc_feature (1030)..(1030): n is a, c, g, or t
  misc_feature (1033)..(1033): n is a, c, g, or t
  misc_feature (1037)..(1037): n is a, c, g, or t
  misc_feature (1042)..(1042): n is a, c, g, or t
  misc_feature (1047)..(1047): n is a, c, g, or t
  misc_feature (1058)..(1058): n is a, c, g, or t
  misc_feature (1070)..(1070): n is a, c, g, or t
  misc_feature (1081)..(1081): n is a, c, g, or t
  misc_feature (1087)..(1088): n is a, c, g, or t
  misc_feature (1108)..(1109): n is a, c, g, or t
  misc_feature (1113)..(1113): n is a, c, g, or t
  misc_feature (1116)..(1116): n is a, c, g, or t
  misc_feature (1137)..(1137): n is a, c, g, or t
  misc_feature (1143)..(1143): n is a, c, g, or t
  misc_feature (1148)..(1148): n is a, c, g, or t
  misc_feature (1160)..(1160): n is a, c, g, or t
  misc_feature (1166)..(1166): n is a, c, g, or t
  misc_feature (1173)..(1173): n is a, c, g, or t
  misc_feature (1176)..(1176): n is a, c, g, or t
  misc_feature (1180)..(1180): n is a, c, g, or t
  misc_feature (1182)..(1182): n is a, c, g, or t
  misc_feature (1184)..(1184): n is a, c, g, or t
  misc_feature (1187)..(1187): n is a, c, g, or t
  misc_feature (1190)..(1190): n is a, c, g, or t
  misc_feature (1197)..(1197): n is a, c, g, or t
  misc_feature (1199)..(1199): n is a, c, g, or t
tagagagaattaactatgagaggatcgcatcaccntcaccatcacggatcctatttaggtganactatagaatcgtcgacccacgcgtccgtaaatatgcaactgccttcaagagagacaaacccctattttaatagcttggagcaaaaggacctggtgggctattcatccacaagggccagttctgtgcccatcatcccttcagtgggtttagaggaaacctgcctgcaaatgccagggatttctgaagtcaaaagcatcaaatggtgcaaaaactcctattcagctgacgttgtcaatgtgagtattccagtcagcgattgtcttatagcagaacaacaagaagtgaaaatattgctagaaactgtccaggagcagatccgaattctgactgatgccagacggtcagaagactacgaactggccagcgtagaaaccgaggacagtgcaagcgaaaacacagcctttctccccctgagtcccacagccaaatcagaacgagaggcgcaatttgtcttaagaaatgaaatacaaagagactctgcattgaccaagtgacttgagatgtaggaatctgtgcattctatgctttgctcaacaggaaagagaggaaatcaaatacaaattatttatatgcattaatttaagagcatctacttagaagaaaccaaatagtctatcgccctcatatcatagtgttttttaacaaaatatttttttaagggaaagaaatgtttcaggagggataaagcttaccattaaagcttttgggtagaattctgaatccaatttcgtttantcccaacactgtcctcttttggctctttagaagatgtgggcaattncaanacccttggccccacagtggccagtgtctcattaaaaaacactggcagttacctggtttccaaaaagaggaaaagctgcatcccgcaggtggatgcacccattgagcaggnggctcttgccatttggcttgccagtcccagcccntaaatttcnnttccccccaatacccncttccnggttntgncagnccaancctgnaagggttttcnatttaattttgnaaaaaggcccnaaaaannctgccatgggaaagaagganngggnaanaaaaggaaaacccggggcaanctttantaccntggggggccccntccccngaaattnaangccnantnccnccnggggggntng

SEQ ID NO: 641 - DNA, 1200 bp, Homo Sapiens
  misc_feature (2)..(2): n is a, c, g, or t
  misc_feature (4)..(4): n is a, c, g, or t
  misc_feature (20)..(20): n is a, c, g, or t
  misc_feature (23)..(23): n is a, c, g, or t
  misc_feature (35)..(35): n is a, c, g, or t
  misc_feature (57)..(57): n is a, c, g, or t
  misc_feature (64)..(64): n is a, c, g, or t
  misc_feature (71)..(72): n is a, c, g, or t
  misc_feature (83)..(83): n is a, c, g, or t
  misc_feature (89)..(89): n is a, c, g, or t
  misc_feature (113)..(114): n is a, c, g, or t
  misc_feature (123)..(123): n is a, c, g, or t
  misc_feature (130)..(130): n is a, c, g, or t
  misc_feature (204)..(204): n is a, c, g, or t
  misc_feature (245)..(245): n is a, c, g, or t
  misc_feature (252)..(252): n is a, c, g, or t
  misc_feature (283)..(283): n is a, c, g, or t
  misc_feature (312)..(312): n is a, c, g, or t
  misc_feature (336)..(336): n is a, c, g, or t
  misc_feature (378)..(378): n is a, c, g, or t
  misc_feature (382)..(382): n is a, c, g, or t
  misc_feature (412)..(412): n is a, c, g, or t
  misc_feature (432)..(432): n is a, c, g, or t
  misc_feature (442)..(442): n is a, c, g, or t
  misc_feature (477)..(477): n is a, c, g, or t
  misc_feature (496)..(496): n is a, c, g, or t
  misc_feature (511)..(511): n is a, c, g, or t
  misc_feature (521)..(521): n is a, c, g, or t
  misc_feature (541)..(541): n is a, c, g, or t
  misc_feature (563)..(563): n is a, c, g, or t
  misc_feature (571)..(571): n is a, c, g, or t
  misc_feature (576)..(577): n is a, c, g, or t
  misc_feature (591)..(591): n is a, c, g, or t
  misc_feature (606)..(606): n is a, c, g, or t
  misc_feature (622)..(622): n is a, c, g, or t
  misc_feature (624)..(625): n is a, c, g, or t
  misc_feature (630)..(630): n is a, c, g, or t
  misc_feature (638)..(638): n is a, c, g, or t
  misc_feature (645)..(645): n is a, c, g, or t
  misc_feature (650)..(651): n is a, c, g, or t
  misc_feature (653)..(653): n is a, c, g, or t
  misc_feature (665)..(665): n is a, c, g, or t
  misc_feature (668)..(668): n is a, c, g, or t
  misc_feature (676)..(676): n is a, c, g, or t
  misc_feature (678)..(678): n is a, c, g, or t
  misc_feature (682)..(682): n is a, c, g, or t
  misc_feature (699)..(699): n is a, c, g, or t
  misc_feature (704)..(704): n is a, c, g, or t
  misc_feature (708)..(708): n is a, c, g, or t
  misc_feature (717)..(717): n is a, c, g, or t
  misc_feature (722)..(722): n is a, c, g, or t
  misc_feature (726)..(727): n is a, c, g, or t
  misc_feature (732)..(732): n is a, c, g, or t
  misc_feature (739)..(739): n is a, c, g, or t
  misc_feature (742)..(742): n is a, c, g, or t
  misc_feature (745)..(746): n is a, c, g, or t
  misc_feature (749)..(749): n is a, c, g, or t
  misc_feature (751)..(752): n is a, c, g, or t
  misc_feature (755)..(756): n is a, c, g, or t
  misc_feature (768)..(768): n is a, c, g, or t
  misc_feature (771)..(772): n is a, c, g, or t
  misc_feature (781)..(781): n is a, c, g, or t
  misc_feature (785)..(785): n is a, c, g, or t
  misc_feature (789)..(789): n is a, c, g, or t
  misc_feature (791)..(792): n is a, c, g, or t
  misc_feature (795)..(796): n is a, c, g, or t
  misc_feature (800)..(801): n is a, c, g, or t
  misc_feature (805)..(805): n is a, c, g, or t
  misc_feature (810)..(810): n is a, c, g, or t
  misc_feature (813)..(814): n is a, c, g, or t
  misc_feature (817)..(817): n is a, c, g, or t
  misc_feature (820)..(820): n is a, c, g, or t
  misc_feature (822)..(822): n is a, c, g, or t
  misc_feature (825)..(825): n is a, c, g, or t
  misc_feature (832)..(833): n is a, c, g, or t
  misc_feature (837)..(837): n is a, c, g, or t
  misc_feature (839)..(839): n is a, c, g, or t
  misc_feature (843)..(843): n is a, c, g, or t
  misc_feature (846)..(846): n is a, c, g, or t
  misc_feature (848)..(854): n is a, c, g, or t
  misc_feature (869)..(869): n is a, c, g, or t
  misc_feature (871)..(871): n is a, c, g, or t
  misc_feature (875)..(875): n is a, c, g, or t
  misc_feature (883)..(883): n is a, c, g, or t
  misc_feature (886)..(886): n is a, c, g, or t
  misc_feature (888)..(891): n is a, c, g, or t
  misc_feature (895)..(896): n is a, c, g, or t
  misc_feature (899)..(900): n is a, c, g, or t
  misc_feature (902)..(902): n is a, c, g, or t
  misc_feature (905)..(905): n is a, c, g, or t
  misc_feature (908)..(908): n is a, c, g, or t
  misc_feature (914)..(915): n is a, c, g, or t
  misc_feature (923)..(923): n is a, c, g, or t
  misc_feature (933)..(936): n is a, c, g, or t
  misc_feature (940)..(940): n is a, c, g, or t
  misc_feature (945)..(945): n is a, c, g, or t
  misc_feature (958)..(958): n is a, c, g, or t
  misc_feature (964)..(964): n is a, c, g, or t
  misc_feature (969)..(970): n is a, c, g, or t
  misc_feature (976)..(976): n is a, c, g, or t
  misc_feature (986)..(986): n is a, c, g, or t
  misc_feature (992)..(992): n is a, c, g, or t
  misc_feature (994)..(995): n is a, c, g, or t
  misc_feature (1000)..(1000): n is a, c, g, or t
  misc_feature (1002)..(1002): n is a, c, g, or t
  misc_feature (1005)..(1005): n is a, c, g, or t
  misc_feature (1018)..(1021): n is a, c, g, or t
  misc_feature (1029)..(1029): n is a, c, g, or t
  misc_feature (1031)..(1032): n is a, c, g, or t
  misc_feature (1037)..(1039): n is a, c, g, or t
  misc_feature (1041)..(1041): n is a, c, g, or t
  misc_feature (1044)..(1045): n is a, c, g, or t
  misc_feature (1057)..(1057): n is a, c, g, or t
  misc_feature (1059)..(1062): n is a, c, g, or t
  misc_feature (1064)..(1064): n is a, c, g, or t
  misc_feature (1066)..(1068): n is a, c, g, or t
  misc_feature (1070)..(1071): n is a, c, g, or t
  misc_feature (1074)..(1074): n is a, c, g, or t
  misc_feature (1077)..(1080): n is a, c, g, or t
  misc_feature (1082)..(1082): n is a, c, g, or t
  misc_feature (1087)..(1087): n is a, c, g, or t
  misc_feature (1089)..(1089): n is a, c, g, or t
  misc_feature (1093)..(1093): n is a, c, g, or t
  misc_feature (1095)..(1095): n is a, c, g, or t
  misc_feature (1099)..(1099): n is a, c, g, or t
  misc_feature (1102)..(1103): n is a, c, g, or t
  misc_feature (1105)..(1105): n is a, c, g, or t
  misc_feature (1110)..(1110): n is a, c, g, or t
  misc_feature (1113)..(1115): n is a, c, g, or t
  misc_feature (1117)..(1117): n is a, c, g, or t
  misc_feature (1124)..(1124): n is a, c, g, or t
  misc_feature (1128)..(1128): n is a, c, g, or t
  misc_feature (1132)..(1132): n is a, c, g, or t
  misc_feature (1137)..(1137): n is a, c, g, or t
  misc_feature (1139)..(1140): n is a, c, g, or t
  misc_feature (1144)..(1144): n is a, c, g, or t
  misc_feature (1147)..(1147): n is a, c, g, or t
  misc_feature (1150)..(1151): n is a, c, g, or t
  misc_feature (1164)..(1164): n is a, c, g, or t
  misc_feature (1168)..(1170): n is a, c, g, or t
  misc_feature (1172)..(1172): n is a, c, g, or t
  misc_feature (1174)..(1174): n is a, c, g, or t
  misc_feature (1177)..(1177): n is a, c, g, or t
  misc_feature (1179)..(1181): n is a, c, g, or t
  misc_feature (1188)..(1189): n is a, c, g, or t
  misc_feature (1193)..(1193): n is a, c, g, or t
ananaagagagaattatctntgnagaggatcggcntcaccctcaccatcacgggatnctatttngggtgannctatagaatcnctcganccacgcgtccgatggtccggagtnnggaaggccntagcagnggcgccagtcgacccgcctcgccacaagcttgcccagaccagacacgtttcatcctgcgccctgcaagaagganccggcctgcctctctccgctttgctgctcctcggcctccgngggcccngcccgcgtcagcagcgaccctggggtctggntcccctgtgtcgcccccgcccgcctgcancgcccggcacccgcccaggagcgngcagctggggttctagggacgtatacttgagcaagagagacnacanctcttgttcccgctgatcctgcagcccagnggatggagtccagaatctanagacctgccnggaaagaaaaaaaaattcctgatgtctggtccaancaggaattccccggtggantggggaatgtctggnttttcctcancttattgatctctgtggtanccactggaggcccccataaganccataaanatgannaggcctgaggtctnacaagtctctgctanaaaaaattttaacctntnnaaagnctcaatantgcaccnccganncnaagttttgtaanggnttcttggngngcangctgacccatgcgcggncaganagcncccctttgntccantgtnnggacntgagcgntgntanngananngtnntgtaactccctnaanntttaggtcngccncccntnntcnnaaanncatngaaanccnntcnttntnccngtttccnnaaangncatngangnnnnnnnttctgacccggtaangnaggncccaacanatngnnnnatannacnngnccnggnttcccnnctttggtnagattaaagnnnnttgnattgngttttttcagagnaaaganccttnncaaaanacatgtcctnactacncnntttcnanaantagaacctaaaannnnaccaaaantnnctttnnngngtnncaccacccctcnannnngncnnncnnctncannnncnggggngnctcncnccanttnncnttttnagnnngnaccattncttnattnaaagntnnaaanccncannatttaaacataantaannntncnaantnnnagaaaannatcnaattaag

SEQ ID NO: 642 - DNA, 1200 bp, Homo Sapiens
  misc_feature (9)..(9): n is a, c, g, or t
  misc_feature (886)..(886): n is a, c, g, or t
  misc_feature (891)..(891): n is a, c, g, or t
  misc_feature (918)..(918): n is a, c, g, or t
  misc_feature (925)..(925): n is a, c, g, or t
  misc_feature (934)..(934): n is a, c, g, or t
  misc_feature (942)..(942): n is a, c, g, or t
  misc_feature (944)..(944): n is a, c, g, or t
  misc_feature (960)..(960): n is a, c, g, or t
  misc_feature (965)..(965): n is a, c, g, or t
  misc_feature (998)..(998): n is a, c, g, or t
  misc_feature (1007)..(1007): n is a, c, g, or t
  misc_feature (1034)..(1034): n is a, c, g, or t
  misc_feature (1036)..(1036): n is a, c, g, or t
  misc_feature (1038)..(1038): n is a, c, g, or t
  misc_feature (1051)..(1051): n is a, c, g, or t
  misc_feature (1057)..(1057): n is a, c, g, or t
  misc_feature (1062)..(1062): n is a, c, g, or t
  misc_feature (1070)..(1070): n is a, c, g, or t
  misc_feature (1084)..(1084): n is a, c, g, or t
  misc_feature (1091)..(1091): n is a, c, g, or t
  misc_feature (1099)..(1099): n is a, c, g, or t
  misc_feature (1102)..(1102): n is a, c, g, or t
  misc_feature (1104)..(1104): n is a, c, g, or t
  misc_feature (1114)..(1114): n is a, c, g, or t
  misc_feature (1138)..(1138): n is a, c, g, or t
  misc_feature (1154)..(1154): n is a, c, g, or t
  misc_feature (1167)..(1167): n is a, c, g, or t
  misc_feature (1169)..(1169): n is a, c, g, or t
  misc_feature (1173)..(1173): n is a, c, g, or t
  misc_feature (1176)..(1178): n is a, c, g, or t
  misc_feature (1189)..(1189): n is a, c, g, or t
  misc_feature (1194)..(1194): n is a, c, g, or t
  misc_feature (1198)..(1198): n is a, c, g, or t
aatagaganattactatgagaggatcgcatcaccatcaccatcacggatcctatttaggtgacactatagaatcgtcgacccacgcgtccgcccgagtcggtcagcgccggaggacctcagcagccatgtcgaagccccatagtgaagccgggactgccttcattcagacccagcagctgcacgcagccatggctgacacattcctggagcacatgtgccgcctggacattgattcaccacccatcacagcccggaacactggcatcatctgtaccattggcccagcttcccgatcagtggagacgttgaaggagatgattaagtctggaatgaatgtggctcgtctgaacttctctcatggaactcatgagtaccatgcggagaccatcaagaatgtgcgcacagccacggaaagctttgcttctgaccccatcctctaccggcccgttgctgtggctctagacactaaaggacctgagatccgaactgggctcatcaagggcagcggcactgcagaggtggagctgaagaagggagccactctcaaaatcacgctggataacgcctacatggaaaagtgtgacgagaacatcctgtggctggactacaagaacatctgcaaggtggtggaagtgggcagcaagatctacgtggatgatgggcttatttctctccaggtgaagcagaaaggtgccgacttcctggtgacggaggtggaaaatggtggctccttgggcagcaagaagggtgtgaaccttcctggggctgctgtggacttgcctgctgtgtcggagaaggacatccaggatctgaagtttggggtcgagcaggatgttgatatggtgtttgcgtcattcatccgcaaggcatctgatgtccatgaanttagnaaggtcctgggaaaaaaaggaaaagancatcaanaattatcancaaaatcnanaatcatgaggggggtncggangtttgatgaaatcctggaaggccagtgatgggnatcatgggnggctcggggtgatctaggcattgaaantncnggcaaaaaagtcntccctngctcnaaaaaatnatgaattgaacggngcaaccnaactgggnaancntgtcttctgngctactccaaatgctgggaaaaanttgatcaaaaaccccnccccccctcgggntnaagnaannnatttggccaangccancctngg

SEQ ID NO: 643 - DNA, 1200 bp, Homo Sapiens
  misc_feature (779)..(779): n is a, c, g, or t
  misc_feature (821)..(821): n is a, c, g, or t
  misc_feature (839)..(839): n is a, c, g, or t
  misc_feature (861)..(861): n is a, c, g, or t
  misc_feature (864)..(864): n is a, c, g, or t
  misc_feature (868)..(868): n is a, c, g, or t
  misc_feature (877)..(877): n is a, c, g, or t
  misc_feature (882)..(882): n is a, c, g, or t
  misc_feature (888)..(888): n is a, c, g, or t
  misc_feature (902)..(902): n is a, c, g, or t
  misc_feature (915)..(915): n is a, c, g, or t
  misc_feature (919)..(919): n is a, c, g, or t
  misc_feature (927)..(927): n is a, c, g, or t
  misc_feature (967)..(967): n is a, c, g, or t
  misc_feature (976)..(976): n is a, c, g, or t
  misc_feature (981)..(981): n is a, c, g, or t
  misc_feature (988)..(988): n is a, c, g, or t
  misc_feature (997)..(997): n is a, c, g, or t
  misc_feature (1001)..(1001): n is a, c, g, or t
  misc_feature (1008)..(1009): n is a, c, g, or t
  misc_feature (1025)..(1025): n is a, c, g, or t
  misc_feature (1029)..(1029): n is a, c, g, or t
  misc_feature (1035)..(1035): n is a, c, g, or t
  misc_feature (1047)..(1047): n is a, c, g, or t
  misc_feature (1051)..(1052): n is a, c, g, or t
  misc_feature (1056)..(1056): n is a, c, g, or t
  misc_feature (1067)..(1067): n is a, c, g, or t
  misc_feature (1079)..(1079): n is a, c, g, or t
  misc_feature (1081)..(1081): n is a, c, g, or t
  misc_feature (1086)..(1086): n is a, c, g, or t
  misc_feature (1094)..(1094): n is a, c, g, or t
  misc_feature (1098)..(1098): n is a, c, g, or t
  misc_feature (1104)..(1104): n is a, c, g, or t
  misc_feature (1108)..(1108): n is a, c, g, or t
  misc_feature (1121)..(1121): n is a, c, g, or t
  misc_feature (1124)..(1124): n is a, c, g, or t
  misc_feature (1134)..(1134): n is a, c, g, or t
  misc_feature (1136)..(1136): n is a, c, g, or t
  misc_feature (1145)..(1147): n is a, c, g, or t
  misc_feature (1151)..(1151): n is a, c, g, or t
  misc_feature (1159)..(1160): n is a, c, g, or t
  misc_feature (1162)..(1162): n is a, c, g, or t
  misc_feature (1165)..(1165): n is a, c, g, or t
  misc_feature (1178)..(1178): n is a, c, g, or t
  misc_feature (1180)..(1180): n is a, c, g, or t
  misc_feature (1183)..(1183): n is a, c, g, or t
  misc_feature (1185)..(1188): n is a, c, g, or t
  misc_feature (1196)..(1198): n is a, c, g, or t
tagagaaattactatgagaggatcgcatcaccatcaccatcacggatcctatttaggtgacactatagaatcgtcgacccacgcgtccgcccacgcgtccgccctgctgtccgatgacttcttggatacccctgatgacctggatattaacgtggatgacatcgagacccccgatgagaccgactcgctggagttcctggggaatggcaacgaactggagtgggaagacgacacccccgtggccaccgccaagaacatgcccggggacagcgcggatctatttggggacggcacgacggaggacggcagcgccgccaacgggcgcctgtggcggacagtgatcatcggggagcaagagcaccgtatagacctgcacatgatccggccttacatgaaagtggtcacccacggagggtactacggcgaaggcctcaacgccatcatcgtcttcgcagcctgcttccttccagacagcagcctccccgactaccactacatcatggagaacctcttcctgtacgtcatcagcagcttagagctcctggtggctgaggactacatgatcgtgtacctgaacggtgccacgccccggcggaggatgcctggaatcggctggctgaagaagtgctaccagatgatcgaccggaggttgcggaaaaacctgaagtccttgatcatcgtccacccctcgtggttcattcggactgtgctggccatctctcgccctttcatcagcgtcaagttcatcaacaagatccagtacgtgcacagcttggaanacctggagcaactcatccctatggaacacgtccagatcccanactgcgtcctgcaatacnaaaaggaaagactgaaggccangangganagcgcgagncccanccggantttgtgctgcccangtctgaaaaaaanccanaggtggcnccagtggaaaacaggtctgctctggtctcaaaaaatcagnaaacaagcntgtcntgaggcnacgtgagcntaanaaagganntggaaaaaattccaangccnaaaaancttttgtcaaancccnntggncccaaatttcntcttgccccatncntgaantccaaatnttcnaagggngccngcccctccgtttnttntttaaaaccnanatctttttnnnctgnttgaaaanntnttnttttttttttttnanaangnnnntttttggnnntt

SEQ ID NO: 644 - DNA, 1200 bp, Homo Sapiens
  misc_feature (880)..(880): n is a, c, g, or t
  misc_feature (898)..(898): n is a, c, g, or t
  misc_feature (916)..(916): n is a, c, g, or t
  misc_feature (938)..(938): n is a, c, g, or t
  misc_feature (981)..(981): n is a, c, g, or t
  misc_feature (985)..(985): n is a, c, g, or t
  misc_feature (994)..(994): n is a, c, g, or t
  misc_feature (1000)..(1000): n is a, c, g, or t
  misc_feature (1008)..(1008): n is a, c, g, or t
  misc_feature (1012)..(1012): n is a, c, g, or t
  misc_feature (1014)..(1014): n is a, c, g, or t
  misc_feature (1022)..(1022): n is a, c, g, or t
  misc_feature (1026)..(1026): n is a, c, g, or t
  misc_feature (1030)..(1030): n is a, c, g, or t
  misc_feature (1032)..(1032): n is a, c, g, or t
  misc_feature (1034)..(1034): n is a, c, g, or t
  misc_feature (1036)..(1036): n is a, c, g, or t
  misc_feature (1038)..(1038): n is a, c, g, or t
  misc_feature (1040)..(1040): n is a, c, g, or t
  misc_feature (1047)..(1047): n is a, c, g, or t
  misc_feature (1064)..(1064): n is a, c, g, or t
  misc_feature (1070)..(1070): n is a, c, g, or t
  misc_feature (1088)..(1088): n is a, c, g, or t
  misc_feature (1106)..(1106): n is a, c, g, or t
  misc_feature (1123)..(1123): n is a, c, g, or t
  misc_feature (1129)..(1129): n is a, c, g, or t
  misc_feature (1152)..(1152): n is a, c, g, or t
  misc_feature (1161)..(1161): n is a, c, g, or t
  misc_feature (1168)..(1169): n is a, c, g, or t
  misc_feature (1174)..(1174): n is a, c, g, or t
  misc_feature (1180)..(1180): n is a, c, g, or t
  misc_feature (1196)..(1196): n is a, c, g, or t
  misc_feature (1200)..(1200): n is a, c, g, or t
tagagaaattactatgagaggatcgcatcaccatcaccatcacggatcctatttaggtgacactatagaatcgtcgacccacgcgtccgggcggccctggccggggagacgagttgcatgtgttggttcagctggcgatagcggcgggagcggagccggcggggcctgtgcgaccgcctgggtttgtgaaatggctgctgacatttctgaatccagcggggctgactgcaaaggagacccaaggaacagtgccaagttagatgccgattacccacttcgagtcctttattgtggagtctgttcattaccaacagagtactgtgaatatatgcctgatgttgctaaatgtagacaatggttagagaagaattttccaaatgaatttgcaaaacttactgtagaaaattcacccaaacaagaagctggaattagtgagggtcaaggaacagcaggggaagaagaggagaagaaaaaacagaagagaggtggaaggggtcaaataaaacaaaaaaaagaagaccgtaccacaaaaggttactatagccaaaattcccagagcaaagaagaaatatgtgacaagagtatgtggccttgcaacttttgaaattgatcttaaagaagcacaaagattttttgctcaaaaattctcctgtggtgcctcagtaacaggggaggatgaaattatcattcagggagattttacagatgacataattgatgtcattcaggaaaaatggccagaggtagatgatgacagcatcgaagatcttggagaagtaaagaagtgaatttgaaaatttgtctgtatttaatggcctgaactgaaagttgatatggccaaagggagagaggccttttaaaatatatatatatatacccntatatatgtatatatacncatatatgtatgtatacncatatacccatgtatatatacntggggggtatgtatacctgtatatatatatacctacccctatntgtntcctttttncccctntttgtttncctntnttcccctntgtntacntntntntntnttccacngtaaaactgtaaactgncccccnccttggcattttccccgnttctgaaaaggctgcttntttttttttttgccaantccaanaaacgggaaactgtcctgccccntgcctgaanaaatttnnccaanaaaaanttttggcctttggaanggan

SEQ ID NO: 645 - DNA, 1200 bp, Homo Sapiens
  misc_feature (795)..(795): n is a, c, g, or t
  misc_feature (849)..(849): n is a, c, g, or t
  misc_feature (875)..(875): n is a, c, g, or t
  misc_feature (884)..(884): n is a, c, g, or t
  misc_feature (920)..(920): n is a, c, g, or t
  misc_feature (927)..(927): n is a, c, g, or t
  misc_feature (940)..(940): n is a, c, g, or t
  misc_feature (942)..(942): n is a, c, g, or t
  misc_feature (947)..(947): n is a, c, g, or t
  misc_feature (957)..(957): n is a, c, g, or t
  misc_feature (986)..(986): n is a, c, g, or t
  misc_feature (990)..(990): n is a, c, g, or t
  misc_feature (1019)..(1019): n is a, c, g, or t
  misc_feature (1022)..(1022): n is a, c, g, or t
  misc_feature (1049)..(1049): n is a, c, g, or t
  misc_feature (1056)..(1056): n is a, c, g, or t
  misc_feature (1059)..(1059): n is a, c, g, or t
  misc_feature (1062)..(1063): n is a, c, g, or t
  misc_feature (1074)..(1074): n is a, c, g, or t
  misc_feature (1082)..(1082): n is a, c, g, or t
  misc_feature (1092)..(1092): n is a, c, g, or t
  misc_feature (1100)..(1100): n is a, c, g, or t
  misc_feature (1102)..(1102): n is a, c, g, or t
  misc_feature (1108)..(1108): n is a, c, g, or t
  misc_feature (1115)..(1115): n is a, c, g, or t
  misc_feature (1119)..(1119): n is a, c, g, or t
  misc_feature (1132)..(1132): n is a, c, g, or t
  misc_feature (1134)..(1134): n is a, c, g, or t
  misc_feature (1136)..(1136): n is a, c, g, or t
  misc_feature (1138)..(1138): n is a, c, g, or t
  misc_feature (1140)..(1140): n is a, c, g, or t
  misc_feature (1146)..(1146): n is a, c, g, or t
  misc_feature (1152)..(1152): n is a, c, g, or t
  misc_feature (1156)..(1156): n is a, c, g, or t
  misc_feature (1159)..(1159): n is a, c, g, or t
  misc_feature (1164)..(1164): n is a, c, g, or t
  misc_feature (1166)..(1166): n is a, c, g, or t
  misc_feature (1172)..(1172): n is a, c, g, or t
  misc_feature (1174)..(1174): n is a, c, g, or t
  misc_feature (1177)..(1177): n is a, c, g, or t
  misc_feature (1182)..(1182): n is a, c, g, or t
  misc_feature (1191)..(1191): n is a, c, g, or t
tagagaaattactatgagaggatcgcatcaccatcaccatcacggatcctatttaggtgacactatagaatcgtcgacccacgcgtccgactccacactctcagtcccccaccccgcccctttccaagcgtgtcccgggccgcagcagcagaaaccgcaccatctccacccccacattctcctcgcgggaagcgcagcagtgcctccaagggttcttaaagcagaggttgtagggcttgcggggggcggtgcggggattcgggcgggggagacgtcagagagccgggagggacgcagagcggagatcccagcgtcgctgggcccccgcgccggccacgccctggccccggctcgagggcggctgcctgggtcttcgtggtctacgccggagtgttgaagggagggcggctgtgggaggcgctggccgggcgcagcgccctggttccgctgccgagcgtggagttgcctctcgactcctcccttttggcgggtgggcgtggggtgaggggggctgggctgtgctgagaagcggggtgcgcgggtcgtctaggtagtgtgggggctgccggaggaatcattaaagagggaaattgttgctttatggcacggcgagagaagagttaggtagttagtgggagtgtagcatccagaaagaggaaaagatccgctgtgttctctgtggggtgagctcacgtctgtgacccctggggaaattatttagcttgtctttgccttgttttggtctgtaaaatggcgatcttatagcctatttcagaattgtgaggattatatganaaaatacacgttaaacgcttaaaacagcgccaggtgctgctcagtacatattanctctgcttttgctctccacgttttangaagttcanaatgactgtgaccttattttctcaaaaaatcagganacttggntctcacacgtganantgaanttatgaaaanagtgatatgtaatatttgaaactcaaacnatcntggacgtaatattactgtacacgtggaanaantaacattttcccaaaagctaaaaaaantgttaanttnttnngtaaaaaaaantggggggnaaaaaaatgnaaaaaaanangggggnaaaaaanaaangaaggggaaaaangnangnangaattngaaagnaaanaantgggntnttaatntnttnaaggnaaatctggnaaaaaaata

SEQ ID NO: 646 - DNA, 1200 bp, Homo Sapiens; identical to SEQ ID NO: 286
  misc_feature (890)..(890): n is a, c, g, or t
  misc_feature (916)..(916): n is a, c, g, or t
  misc_feature (918)..(918): n is a, c, g, or t
  misc_feature (934)..(934): n is a, c, g, or t
  misc_feature (936)..(936): n is a, c, g, or t
  misc_feature (955)..(955): n is a, c, g, or t
  misc_feature (965)..(965): n is a, c, g, or t
  misc_feature (976)..(976): n is a, c, g, or t
  misc_feature (1001)..(1001): n is a, c, g, or t
  misc_feature (1025)..(1025): n is a, c, g, or t
  misc_feature (1040)..(1040): n is a, c, g, or t
  misc_feature (1043)..(1043): n is a, c, g, or t
  misc_feature (1057)..(1057): n is a, c, g, or t
  misc_feature (1062)..(1063): n is a, c, g, or t
  misc_feature (1067)..(1067): n is a, c, g, or t
  misc_feature (1071)..(1071): n is a, c, g, or t
  misc_feature (1074)..(1074): n is a, c, g, or t
  misc_feature (1108)..(1108): n is a, c, g, or t
  misc_feature (1122)..(1122): n is a, c, g, or t
  misc_feature (1129)..(1129): n is a, c, g, or t
  misc_feature (1132)..(1132): n is a, c, g, or t
  misc_feature (1144)..(1145): n is a, c, g, or t
  misc_feature (1155)..(1155): n is a, c, g, or t
  misc_feature (1175)..(1175): n is a, c, g, or t
  misc_feature (1191)..(1200): n is a, c, g, or t

SEQ ID NO: 647 - DNA, 1200 bp, Homo Sapiens
  misc_feature (842)..(842): n is a, c, g, or t
  misc_feature (936)..(936): n is a, c, g, or t
  misc_feature (942)..(942): n is a, c, g, or t
  misc_feature (970)..(970): n is a, c, g, or t
  misc_feature (998)..(998): n is a, c, g, or t
  misc_feature (1009)..(1009): n is a, c, g, or t
  misc_feature (1026)..(1026): n is a, c, g, or t
  misc_feature (1036)..(1036): n is a, c, g, or t
  misc_feature (1042)..(1042): n is a, c, g, or t
  misc_feature (1044)..(1045): n is a, c, g, or t
  misc_feature (1053)..(1053): n is a, c, g, or t
  misc_feature (1057)..(1057): n is a, c, g, or t
  misc_feature (1061)..(1061): n is a, c, g, or t
  misc_feature (1064)..(1064): n is a, c, g, or t
  misc_feature (1067)..(1067): n is a, c, g, or t
  misc_feature (1069)..(1069): n is a, c, g, or t
  misc_feature (1074)..(1074): n is a, c, g, or t
  misc_feature (1078)..(1078): n is a, c, g, or t
  misc_feature (1090)..(1090): n is a, c, g, or t
  misc_feature (1095)..(1095): n is a, c, g, or t
  misc_feature (1098)..(1098): n is a, c, g, or t
  misc_feature (1104)..(1104): n is a, c, g, or t
  misc_feature (1108)..(1108): n is a, c, g, or t
  misc_feature (1112)..(1112): n is a, c, g, or t
  misc_feature (1131)..(1131): n is a, c, g, or t
  misc_feature (1145)..(1145): n is a, c, g, or t
  misc_feature (1148)..(1148): n is a, c, g, or t
  misc_feature (1157)..(1158): n is a, c, g, or t
  misc_feature (1163)..(1163): n is a, c, g, or t
tagagaaattactatgagaggatcgcatcaccatcaccatcacggatcctatttaggtgacactatagaatcgtcgacccacgcgtccgcggacgcgtgggtggaaatgagattactcgaggaggctccacctcttatggaaccggatcagagacggaaagccccaggaaccctagcagtgctggaagctggaactctgggagctctggacctggaagtactggaaaccgaaaccctgggagctctgggactggagggactgcaacctggaaacctgggagctctggacctggaagtactggaagctggaactctgggagctctggaactggaagtactggaaaccaaaaccctgggagccctagacctggtagtaccggaacctggaatcctggcagctctgaacgcggaagtgctgggcactggacctctgagagctctgtatctggtagtactggacaatggcactctgaatctggaagttttaggccagatagcccaggctctgggaacgcgaggcctaacaacccagactggggcacatttgaagaggtgtcaggaaatgtaagtccagggacaaggagagagtaccacacagaaaaactggtcacttctaaaggagataaagagctcaggactggtaaagagaaggtcacctctggtagcacaaccaccacgcgtcgttcatgctctaaaaccgttactaagactgttattggtcctgatggtcacaaagaagttaccaaagaagtggtgacctccgaagatggttctgactgtcccgaggcaatggatttaggcacattgtctggcataggtactctggatgggttccgccatangcaccctgatgaagctgccttcttcgacactgcctcaactggaaaaacattcccaggtttcttctcacctatgttaggagagtttgtcagtganactgantctaggggctcaaaatctggcatcttcncaaatacaaaggaatccagttctcatcnccctgggatanctgaattcccttcccgnggtaaatctncagttncnnccaaacantttnctantanccnantttanacanaggaaactcccnttttnaancaaaancttnaaantggccaaaagagcccgaantgaaccccattttnaangaacccttnnccccnaaaaggccttgctaaattcccccctgtcaaagaatcc

SEQ ID NO: 648 - DNA, 1200 bp, Homo Sapiens
  misc_feature (885)..(885): n is a, c, g, or t
  misc_feature (889)..(889): n is a, c, g, or t
  misc_feature (895)..(895): n is a, c, g, or t
  misc_feature (910)..(910): n is a, c, g, or t
  misc_feature (951)..(951): n is a, c, g, or t
  misc_feature (960)..(960): n is a, c, g, or t
  misc_feature (977)..(977): n is a, c, g, or t
  misc_feature (983)..(983): n is a, c, g, or t
  misc_feature (996)..(996): n is a, c, g, or t
  misc_feature (1009)..(1009): n is a, c, g, or t
  misc_feature (1020)..(1020): n is a, c, g, or t
  misc_feature (1029)..(1029): n is a, c, g, or t
  misc_feature (1033)..(1033): n is a, c, g, or t
  misc_feature (1063)..(1063): n is a, c, g, or t
  misc_feature (1068)..(1068): n is a, c, g, or t
  misc_feature (1074)..(1074): n is a, c, g, or t
  misc_feature (1080)..(1082): n is a, c, g, or t
  misc_feature (1086)..(1087): n is a, c, g, or t
  misc_feature (1091)..(1092): n is a, c, g, or t
  misc_feature (1098)..(1098): n is a, c, g, or t
  misc_feature (1102)..(1102): n is a, c, g, or t
  misc_feature (1113)..(1114): n is a, c, g, or t
  misc_feature (1119)..(1119): n is a, c, g, or t
  misc_feature (1127)..(1128): n is a, c, g, or t
  misc_feature (1136)..(1136): n is a, c, g, or t
  misc_feature (1139)..(1139): n is a, c, g, or t
  misc_feature (1141)..(1141): n is a, c, g, or t
  misc_feature (1144)..(1144): n is a, c, g, or t
  misc_feature (1150)..(1150): n is a, c, g, or t
  misc_feature (1152)..(1152): n is a, c, g, or t
  misc_feature (1160)..(1160): n is a, c, g, or t
  misc_feature (1166)..(1166): n is a, c, g, or t
  misc_feature (1170)..(1170): n is a, c, g, or t
  misc_feature (1185)..(1187): n is a, c, g, or t
  misc_feature (1198)..(1198): n is a, c, g, or t
aatagagaaattactatgagaggatcgcatcaccatcaccatcacggatcctatttaggtgacactatagaatcgtcgacccacgcgtccgcccacgcgtccggggagaggcaggagagcccgagacttggaaaccccaaagtgtccgcgaccctgcacggcaggctcccttccagcttcatgggcaaagtgtggaaacagcagatgtaccctcagtacgccacctactattacccccagtatctgcaagccaagcagtctctggtcccagcccaccccatggcccctcccagtcccagcaccaccagcagtaataacaacagtagcagcagtagcaactcaggatgggatcagctcagcaaaacgaacctctatatccgaggactgcctccccacaccaccgaccaggacctggtgaagctctgtcaaccatatgggaaaatagtctccacaaaggcaattttggataagacaacgaacaaatgcaaaggttatggttttgtcgactttgacagccctgcagcagctcaaaaagctgtgtctgccctgaaggccagtggggttcaagctcaaatggcaaagcaacaggaacaagatcctaccaacctctacatttctaatttgccactctccatggatgagcaagaactagaaaatatgctcaaaccatttggacaagttatttctacaaggatactacgtgattccagtggtacaagtcgtggtgttggctttgctaggatggaatcaacagaaaaaatgtgaagctgttattggtcattttaatggaaaatttattaagacaccaccaggagtttctgcccccacagaacctttattgtgtaagttttgctgatggaggacagaaaaaagagacagaacccnaacnaatacntcccctaatgggaanaaccatgggcataaaagaaggaaaaggtgagacttgctggnaatgacacnttactttaagacccaanctacangctggctataaanaaacggaattttntcctttcaccnattcaggtnttgnctacaaaccgaatggatcctcaaacttctnttaanccctanattgcnnncccnngtanntgcccnacanggggcaaagtnnttcgnggatgcannctccaccnatntnttnttaagncncctggggnccgggnttanttcccctaaaggaannnaccattgttcntt

SEQ ID NO: 649 - DNA, 1200 bp, Homo Sapiens
  misc_feature (830)..(830): n is a, c, g, or t
  misc_feature (896)..(896): n is a, c, g, or t
  misc_feature (954)..(954): n is a, c, g, or t
  misc_feature (957)..(957): n is a, c, g, or t
  misc_feature (962)..(962): n is a, c, g, or t
  misc_feature (974)..(974): n is a, c, g, or t
  misc_feature (983)..(983): n is a, c, g, or t
  misc_feature (988)..(988): n is a, c, g, or t
  misc_feature (991)..(991): n is a, c, g, or t
  misc_feature (1003)..(1003): n is a, c, g, or t
  misc_feature (1005)..(1005): n is a, c, g, or t
  misc_feature (1017)..(1017): n is a, c, g, or t
  misc_feature (1025)..(1025): n is a, c, g, or t
  misc_feature (1075)..(1075): n is a, c, g, or t
  misc_feature (1096)..(1096): n is a, c, g, or t
  misc_feature (1104)..(1104): n is a, c, g, or t
  misc_feature (1118)..(1118): n is a, c, g, or t
  misc_feature (1120)..(1120): n is a, c, g, or t
  misc_feature (1122)..(1122): n is a, c, g, or t
  misc_feature (1126)..(1126): n is a, c, g, or t
  misc_feature (1132)..(1132): n is a, c, g, or t
  misc_feature (1144)..(1144): n is a, c, g, or t
  misc_feature (1146)..(1146): n is a, c, g, or t
  misc_feature (1148)..(1148): n is a, c, g, or t
  misc_feature (1155)..(1155): n is a, c, g, or t
  misc_feature (1161)..(1161): n is a, c, g, or t
  misc_feature (1164)..(1164): n is a, c, g, or t
  misc_feature (1171)..(1171): n is a, c, g, or t
  misc_feature (1177)..(1177): n is a, c, g, or t
  misc_feature (1184)..(1184): n is a, c, g, or t
  misc_feature (1189)..(1191): n is a, c, g, or t
aattagagaaattactatgagaggatcgcatcaccatcaccatcacggatcctatttaggtgacactatagaatcgtcgacccacgcgtccggtgacgagtcccgcgttctctccttgaatccactcgccagcccgccgccctctgccgccgcaccctgcacacccgcccctctcctgtgccaggaacttgctactaccagcaccatgccctaccaatatccagcactgaccccggagcagaagaaggagctgtctgacatcgctcaccgcatcgtggcacctggcaagggcatcctggctgcagatgagtccactgggagcattgccaagcggctgcagtccattggcaccgagaacaccgaggagaaccggcgcttctaccgccagctgctgctgacagctgacgaccgcgtgaacccctgcattgggggtgtcatcctcttccatgagacactctaccagaaggcggatgatgggcgtcccttcccccaagttatcaaatccaagggcggtgttgtgggcatcaaggtagacaagggcgtggtccccctggcagggacaaatggcgagactaccacccaagggttggatgggctgtctgagcgctgtgcccagtacaagaaggacggagctgacttcgccaagtggcgttgttgtgctgaagattggggaacacaccccctcagccctcgccatcatggaaaatgccaatgttctggcccgttatgccagtatctgccagcagaatggcattgtgcccatcgtggagcctgagatcctccctgatggggaccatgacttgaagcgctgccagtatgtgaccgaaaangtgctggctgctgtctacaaggctctgagtgaccaccacatctacctggaaggcaccttgctgaancccaaaatggtcaccccaggccatgcttgcactcaaaaattttctcatgaagaaaatngcnatggngaacgttcaagngctgcgccncaaantgnccccccgctgtnantgggaatccccnttcctgtntggaaggccaaaatgaagaaggaaggcgtccatcaacctcaaaggccttnaaaaagtgccccctgttaaanccctgggncctgaactttttcntnanggcnaaaccntggaggctttgncntnaaagccntggggnggnaaaaaanaaaacntaaaggntgccnnngaaaaaaat

SEQ ID NO: 650 - DNA, 1200 bp, Homo Sapiens; identical to SEQ ID NO: 209
  misc_feature (965)..(965): n is a, c, g, or t
  misc_feature (977)..(977): n is a, c, g, or t
  misc_feature (985)..(985): n is a, c, g, or t
  misc_feature (990)..(990): n is a, c, g, or t
  misc_feature (992)..(992): n is a, c, g, or t
  misc_feature (1003)..(1003): n is a, c, g, or t
  misc_feature (1065)..(1065): n is a, c, g, or t
  misc_feature (1069)..(1069): n is a, c, g, or t
  misc_feature (1073)..(1073): n is a, c, g, or t
  misc_feature (1091)..(1091): n is a, c, g, or t
  misc_feature (1102)..(1102): n is a, c, g, or t
  misc_feature (1133)..(1133): n is a, c, g, or t
  misc_feature (1139)..(1140): n is a, c, g, or t
  misc_feature (1142)..(1142): n is a, c, g, or t
  misc_feature (1147)..(1147): n is a, c, g, or t
  misc_feature (1169)..(1169): n is a, c, g, or t

SEQ ID NO: 651 - DNA, 1200 bp, Homo Sapiens
  misc_feature (1)..(1): n is a, c, g, or t
  misc_feature (14)..(14): n is a, c, g, or t
  misc_feature (880)..(880): n is a, c, g, or t
  misc_feature (914)..(914): n is a, c, g, or t
  misc_feature (919)..(919): n is a, c, g, or t
  misc_feature (946)..(946): n is a, c, g, or t
  misc_feature (955)..(955): n is a, c, g, or t
  misc_feature (957)..(957): n is a, c, g, or t
  misc_feature (960)..(960): n is a, c, g, or t
  misc_feature (971)..(971): n is a, c, g, or t
  misc_feature (988)..(988): n is a, c, g, or t
  misc_feature (1012)..(1012): n is a, c, g, or t
  misc_feature (1033)..(1033): n is a, c, g, or t
  misc_feature (1058)..(1058): n is a, c, g, or t
  misc_feature (1069)..(1069): n is a, c, g, or t
  misc_feature (1091)..(1091): n is a, c, g, or t
  misc_feature (1098)..(1098): n is a, c, g, or t
  misc_feature (1100)..(1100): n is a, c, g, or t
  misc_feature (1111)..(1111): n is a, c, g, or t
  misc_feature (1131)..(1132): n is a, c, g, or t
  misc_feature (1144)..(1144): n is a, c, g, or t
  misc_feature (1146)..(1146): n is a, c, g, or t
  misc_feature (1149)..(1149): n is a, c, g, or t
  misc_feature (1166)..(1166): n is a, c, g, or t
  misc_feature (1176)..(1176): n is a, c, g, or t
  misc_feature (1194)..(1194): n is a, c, g, or t
  misc_feature (1196)..(1199): n is a, c, g, or t
naaattagagaganttactatgagaggatcgcatcaccatcaccatcacgggatcctatttaggtgacactatagaatcgtcgacccacgcgtccggtgacgagtcccgcgttctctccttgaatccactcgccagcccgccgccctctgccgccgcaccctgcacacccgcccctctcctgtgccaggaacttgctactaccagcaccatgccctaccaatatccagcactgaccccggagcagaagaaggagctgtctgacatcgctcaccgcatcgtggcacctggcaagggcatcctggctgcagatgagtccactgggagcattgccaagcggctgcagtccattggcaccgagaacaccgaggagaaccggcgcttctaccgccagctgctgctgacagctgacgaccgcgtgaacccctgcattgggggtgtcatcctcttccatgagacactctaccagaaggcggatgatgggcgtcccttcccccaagttatcaaatccaagggcggtgttgtgggcatcaaggtagacaagggcgtggtccccctggcagggacaaatggcgagactaccacccaagggttggatgggctgtctgagcgctgtgcccagtacaagaaggacggagctgacttcgccaagtggcgttgtgtgctgaagattggggaacacaccccctcagccctcgccatcatggaaaatgccaatgttctggcccgttatgccagtatctgccagcagaatggcattgtgcccatcgtggagcctgagatcctccctgatggggaccatgacttgaagcgctgccagtatgtgaccgaaaaaggtgctggctgctgtctacaaggctctgagtgaccaccacatctacntggaaggcaccttgctgaagcccaacatggtcancccanggccatgcttgcactcaaaaatttttntcatgaagnanatngccatggggancggtcaaagcgcttgcnccgcaaaagtgccccccgctgtcnctgggaatcacctttcctggntggagggcaaaatgaggaagaaagngtccattcaanctcaaggccattaaaaaagggncccctgntnaaaccctgggnccctaacttttcttaaggcnnaacctggaaggncnttncctgaaaggcctggggngggaaaaaangaaaacttaaagctgccnannnna

SEQ ID NO: 652 - DNA, 1200 bp, Homo Sapiens
  misc_feature (789)..(789): n is a, c, g, or t
  misc_feature (843)..(843): n is a, c, g, or t
  misc_feature (845)..(845): n is a, c, g, or t
  misc_feature (862)..(862): n is a, c, g, or t
  misc_feature (865)..(865): n is a, c, g, or t
  misc_feature (895)..(895): n is a, c, g, or t
  misc_feature (937)..(937): n is a, c, g, or t
  misc_feature (940)..(940): n is a, c, g, or t
  misc_feature (969)..(969): n is a, c, g, or t
  misc_feature (989)..(989): n is a, c, g, or t
  misc_feature (1025)..(1025): n is a, c, g, or t
  misc_feature (1036)..(1036): n is a, c, g, or t
  misc_feature (1050)..(1050): n is a, c, g, or t
  misc_feature (1052)..(1052): n is a, c, g, or t
  misc_feature (1054)..(1054): n is a, c, g, or t
  misc_feature (1062)..(1062): n is a, c, g, or t
  misc_feature (1072)..(1072): n is a, c, g, or t
  misc_feature (1074)..(1075): n is a, c, g, or t
  misc_feature (1086)..(1086): n is a, c, g, or t
  misc_feature (1088)..(1088): n is a, c, g, or t
  misc_feature (1097)..(1097): n is a, c, g, or t
  misc_feature (1104)..(1104): n is a, c, g, or t
  misc_feature (1106)..(1106): n is a, c, g, or t
  misc_feature (1109)..(1109): n is a, c, g, or t
  misc_feature (1112)..(1112): n is a, c, g, or t
  misc_feature (1129)..(1129): n is a, c, g, or t
  misc_feature (1135)..(1136): n is a, c, g, or t
  misc_feature (1141)..(1141): n is a, c, g, or t
  misc_feature (1148)..(1148): n is a, c, g, or t
  misc_feature (1153)..(1153): n is a, c, g, or t
  misc_feature (1155)..(1155): n is a, c, g, or t
  misc_feature (1159)..(1160): n is a, c, g, or t
  misc_feature (1165)..(1166): n is a, c, g, or t
  misc_feature (1170)..(1170): n is a, c, g, or t
  misc_feature (1176)..(1176): n is a, c, g, or t
  misc_feature (1182)..(1188): n is a, c, g, or t
  misc_feature (1190)..(1190): n is a, c, g, or t
  misc_feature (1193)..(1193): n is a, c, g, or t
  misc_feature (1196)..(1196): n is a, c, g, or t
agaaattactatgagaggatcgcatcaccatcaccatcacggatcctatttaggtgacactatagaatcgtcgacccacgcgtccgagccggtgggtagagaggaaggtgagtcgggggctttggaggcagaaagcccctcgcccgctgcgcggctcgcggggaactgcggaagcgccgacggtcacaccccctggcccgcctccttgcgtgctgcgccccgggacccccagacttgtgctccccatccgggcgcgggcaccccaagaatcgggcccccagcgcgctgagggtgaagggccgctcacgctcaggccctgggttttcctcctcctccttcatcattcactacagcgcagtttttcccacattcgaggactgtcatccctatactcgtcctgtcggagacctacagtctttgccatcccgtggagcacatgatccagaagaaccaatgtctcttcaccaacacccagtgtaaggtttgctgcgccttgcttatttctgagtcccagaagctggcacattaccagagcaaaaaacatgccaacaaagtgaagagatacctagcaatccatggaatggagacattaaagggggaaacgaagaagctagactcagatcagccttgcaccagaatagagagatgatagacccagacaagttctgcagcctctgccatgcaactttcaacgaccctgtcatggctcaacaacattatgtgggcaagaaacacagaaaacaggagaccaagctcaaactaatggcacgctatgggcggctggcggancctgctgtcactgactttccagctggaaagggctacccctgcaaaacatgtaananagtgctgaactccatanaanagtaccaagctcatgtcagcggcttcaaanacaaaaaccagtcaccaaaaacagtggcatcatccctgggcnaantccaatgcaaaggcaacccattcaaaaanactcaaccaccttggaaaantaaaggtgattctgccaacatcccatattgggccanccatgaaccancttcccgtgaaggntnanccctgggntccctcttgntnnttgtttccccnanaaaaaaaancgggccntnagnaanaattgggccaaaaaaancctccnnttggnccggggnaattnancccnnggggnncccntttggnaggggnnnnnnnanttnttnaaag

SEQ ID NO: 653 - DNA, 1200 bp, Homo Sapiens
  misc_feature (1)..(2): n is a, c, g, or t
  misc_feature (437)..(437): n is a, c, g, or t
  misc_feature (488)..(488): n is a, c, g, or t
  misc_feature (509)..(509): n is a, c, g, or t
  misc_feature (539)..(540): n is a, c, g, or t
  misc_feature (551)..(551): n is a, c, g, or t
  misc_feature (571)..(571): n is a, c, g, or t
  misc_feature (582)..(582): n is a, c, g, or t
  misc_feature (608)..(609): n is a, c, g, or t
  misc_feature (614)..(614): n is a, c, g, or t
  misc_feature (618)..(618): n is a, c, g, or t
  misc_feature (621)..(621): n is a, c, g, or t
  misc_feature (625)..(625): n is a, c, g, or t
  misc_feature (635)..(635): n is a, c, g, or t
  misc_feature (639)..(639): n is a, c, g, or t
  misc_feature (641)..(641): n is a, c, g, or t
  misc_feature (654)..(654): n is a, c, g, or t
  misc_feature (656)..(657): n is a, c, g, or t
  misc_feature (684)..(685): n is a, c, g, or t
  misc_feature (687)..(687): n is a, c, g, or t
  misc_feature (694)..(694): n is a, c, g, or t
  misc_feature (700)..(700): n is a, c, g, or t
  misc_feature (702)..(702): n is a, c, g, or t
  misc_feature (706)..(706): n is a, c, g, or t
  misc_feature (708)..(708): n is a, c, g, or t
  misc_feature (712)..(712): n is a, c, g, or t
  misc_feature (714)..(714): n is a, c, g, or t
  misc_feature (722)..(722): n is a, c, g, or t
  misc_feature (724)..(724): n is a, c, g, or t
  misc_feature (732)..(732): n is a, c, g, or t
  misc_feature (739)..(739): n is a, c, g, or t
  misc_feature (760)..(760): n is a, c, g, or t
  misc_feature (767)..(768): n is a, c, g, or t
  misc_feature (780)..(780): n is a, c, g, or t
  misc_feature (784)..(784): n is a, c, g, or t
  misc_feature (786)..(786): n is a, c, g, or t
  misc_feature (788)..(788): n is a, c, g, or t
  misc_feature (792)..(792): n is a, c, g, or t
  misc_feature (796)..(796): n is a, c, g, or t
  misc_feature (801)..(801): n is a, c, g, or t
  misc_feature (805)..(805): n is a, c, g, or t
  misc_feature (809)..(809): n is a, c, g, or t
  misc_feature (812)..(812): n is a, c, g, or t
  misc_feature (817)..(817): n is a, c, g, or t
  misc_feature (822)..(822): n is a, c, g, or t
  misc_feature (839)..(839): n is a, c, g, or t
  misc_feature (860)..(860): n is a, c, g, or t
  misc_feature (864)..(865): n is a, c, g, or t
  misc_feature (875)..(876): n is a, c, g, or t
  misc_feature (892)..(892): n is a, c, g, or t
  misc_feature (894)..(894): n is a, c, g, or t
  misc_feature (896)..(898): n is a, c, g, or t
  misc_feature (900)..(900): n is a, c, g, or t
  misc_feature (906)..(906): n is a, c, g, or t
  misc_feature (915)..(915): n is a, c, g, or t
  misc_feature (917)..(919): n is a, c, g, or t
  misc_feature (921)..(921): n is a, c, g, or t
  misc_feature (932)..(932): n is a, c, g, or t
  misc_feature (935)..(935): n is a, c, g, or t
  misc_feature (938)..(938): n is a, c, g, or t
  misc_feature (940)..(940): n is a, c, g, or t
  misc_feature (943)..(944): n is a, c, g, or t
  misc_feature (949)..(950): n is a, c, g, or t
  misc_feature (952)..(952): n is a, c, g, or t
  misc_feature (959)..(959): n is a, c, g, or t
  misc_feature (964)..(964): n is a, c, g, or t
  misc_feature (976)..(976): n is a, c, g, or t
  misc_feature (981)..(982): n is a, c, g, or t
  misc_feature (994)..(994): n is a, c, g, or t
  misc_feature (1000)..(1000): n is a, c, g, or t
  misc_feature (1022)..(1022): n is a, c, g, or t
  misc_feature (1029)..(1030): n is a, c, g, or t
  misc_feature (1037)..(1038): n is a, c, g, or t
  misc_feature (1041)..(1042): n is a, c, g, or t
  misc_feature (1046)..(1046): n is a, c, g, or t
  misc_feature (1048)..(1048): n is a, c, g, or t
  misc_feature (1054)..(1054): n is a, c, g, or t
  misc_feature (1061)..(1062): n is a, c, g, or t
  misc_feature (1065)..(1065): n is a, c, g, or t
  misc_feature (1067)..(1067): n is a, c, g, or t
  misc_feature (1073)..(1073): n is a, c, g, or t
  misc_feature (1076)..(1076): n is a, c, g, or t
  misc_feature (1088)..(1088): n is a, c, g, or t
  misc_feature (1091)..(1092): n is a, c, g, or t
  misc_feature (1099)..(1099): n is a, c, g, or t
  misc_feature (1102)..(1102): n is a, c, g, or t
  misc_feature (1108)..(1108): n is a, c, g, or t
  misc_feature (1110)..(1110): n is a, c, g, or t
  misc_feature (1115)..(1115): n is a, c, g, or t
  misc_feature (1117)..(1117): n is a, c, g, or t
  misc_feature (1119)..(1119): n is a, c, g, or t
  misc_feature (1122)..(1122): n is a, c, g, or t
  misc_feature (1124)..(1124): n is a, c, g, or t
  misc_feature (1135)..(1135): n is a, c, g, or t
  misc_feature (1138)..(1139): n is a, c, g, or t
  misc_feature (1141)..(1141): n is a, c, g, or t
  misc_feature (1156)..(1156): n is a, c, g, or t
  misc_feature (1158)..(1159): n is a, c, g, or t
  misc_feature (1162)..(1162): n is a, c, g, or t
  misc_feature (1171)..(1171): n is a, c, g, or t
  misc_feature (1175)..(1175): n is a, c, g, or t
  misc_feature (1177)..(1177): n is a, c, g, or t
  misc_feature (1184)..(1184): n is a, c, g, or t
  misc_feature (1186)..(1186): n is a, c, g, or t
  misc_feature (1188)..(1188): n is a, c, g, or t
  misc_feature (1196)..(1196): n is a, c, g, or t
nntagagaaattactatgagaggatcgcatcaccatcaccatcacggatcctatttaggtgacactatagaatcgtcgacccacgcgtccgcccacgcgtccggtcgtgcctcgcgcactacactagccccctcatccgggttctctcccggcgtgccccgcgccgggtttgttggggggtactcggcagtgcagccatgactatactccccaaaaagaagccgccgcctcccgacgccgaccccgccaacgagccgccgccgcccgggccgatgcccccggcgccgcggcgcggcggaggtgtgggcgtgggcggcggcggcacgggcgtgggcggcggcgatcgcgaccgtgactccggcgtcgtgggggcccgtccgcgagcttcgccaccgcctcaaggcccgctaccaggaccgccgggcgctcttcatcgntgggcgctggccgtgccgcctggtgcagtggcgggtccccggccacaacangcttctccacctccttgcggnggcccaggtggtcccggcggcggtcccggnnacgcgctgggngcaacggcagcggatgtggntgccgcgtgcntggtggtgggtgtggatgattgccgnnaagcntggncgnctgntgctccgggnctgngnacaacaagcggcnanntcaagcttcccagggttggagcggttnnanggggcantccccnancgtnangaantngggcacangntacaaaantgaggangaaatatgaatgcgggcttgnaatcaannatctaaaagttnagtnancnctgnccantggtntaancaanaangaatnatttngtttttaaaaaagcccntaaaaaaaaaaaagaaagggncttnnataattcatnnaaaataaaagaaaaangntnnncntgtttntttttcgangnnntntaagtcaactnaanaangnaannaaaannancgtcctnaaaanaaaaaaaatatnaattnngtggaaaaaatnctcaangagaaaaaaaaaagagaattantatcttnncttatannccnnttananttatanaaaaaanntananaaaaanttntaaataatttgnagnnaaaagtnttnctaatncnttatntnanaantnaaatttaaaanttnntntgtaaaaacaacaanannaancttaatttntttnancaaaaantntnttattggnaaat

SEQ ID NO: 654 - DNA, 1342 bp, Homo Sapiens
  misc_feature (808)..(808): n is a, c, g, or t
  misc_feature (823)..(823): n is a, c, g, or t
  misc_feature (859)..(859): n is a, c, g, or t
  misc_feature (861)..(861): n is a, c, g, or t
  misc_feature (866)..(866): n is a, c, g, or t
  misc_feature (879)..(879): n is a, c, g, or t
  misc_feature (887)..(887): n is a, c, g, or t
  misc_feature (897)..(897): n is a, c, g, or t
  misc_feature (918)..(918): n is a, c, g, or t
  misc_feature (947)..(947): n is a, c, g, or t
  misc_feature (952)..(952): n is a, c, g, or t
  misc_feature (969)..(969): n is a, c, g, or t
  misc_feature (974)..(974): n is a, c, g, or t
  misc_feature (981)..(981): n is a, c, g, or t
  misc_feature (991)..(991): n is a, c, g, or t
  misc_feature (997)..(997): n is a, c, g, or t
  misc_feature (1014)..(1014): n is a, c, g, or t
  misc_feature (1017)..(1018): n is a, c, g, or t
  misc_feature (1022)..(1022): n is a, c, g, or t
  misc_feature (1034)..(1034): n is a, c, g, or t
  misc_feature (1049)..(1050): n is a, c, g, or t
  misc_feature (1054)..(1054): n is a, c, g, or t
  misc_feature (1057)..(1057): n is a, c, g, or t
  misc_feature (1059)..(1059): n is a, c, g, or t
  misc_feature (1065)..(1065): n is a, c, g, or t
  misc_feature (1074)..(1074): n is a, c, g, or t
  misc_feature (1081)..(1083): n is a, c, g, or t
  misc_feature (1088)..(1089): n is a, c, g, or t
  misc_feature (1096)..(1096): n is a, c, g, or t
  misc_feature (1104)..(1105): n is a, c, g, or t
  misc_feature (1108)..(1108): n is a, c, g, or t
  misc_feature (1112)..(1112): n is a, c, g, or t
  misc_feature (1124)..(1124): n is a, c, g, or t
  misc_feature (1132)..(1132): n is a, c, g, or t
  misc_feature (1136)..(1136): n is a, c, g, or t
  misc_feature (1146)..(1147): n is a, c, g, or t
  misc_feature (1149)..(1149): n is a, c, g, or t
  misc_feature (1151)..(1152): n is a, c, g, or t
  misc_feature (1159)..(1159): n is a, c, g, or t
  misc_feature (1161)..(1161): n is a, c, g, or t
  misc_feature (1165)..(1166): n is a, c, g, or t
  misc_feature (1169)..(1169): n is a, c, g, or t
  misc_feature (1172)..(1172): n is a, c, g, or t
  misc_feature (1192)..(1192): n is a, c, g, or t
  misc_feature (1195)..(1198): n is a, c, g, or t
  misc_feature (1200)..(1201): n is a, c, g, or t
  misc_feature (1208)..(1208): n is a, c, g, or t
  misc_feature (1218)..(1218): n is a, c, g, or t
  misc_feature (1220)..(1223): n is a, c, g, or t
  misc_feature (1225)..(1229): n is a, c, g, or t
  misc_feature (1231)..(1235): n is a, c, g, or t
  misc_feature (1239)..(1244): n is a, c, g, or t
  misc_feature (1247)..(1248): n is a, c, g, or t
  misc_feature (1251)..(1251): n is a, c, g, or t
  misc_feature (1256)..(1259): n is a, c, g, or t
  misc_feature (1263)..(1263): n is a, c, g, or t
  misc_feature (1265)..(1265): n is a, c, g, or t
  misc_feature (1271)..(1271): n is a, c, g, or t
  misc_feature (1273)..(1274): n is a, c, g, or t
  misc_feature (1277)..(1278): n is a, c, g, or t
  misc_feature (1288)..(1292): n is a, c, g, or t
  misc_feature (1296)..(1299): n is a, c, g, or t
  misc_feature (1301)..(1320): n is a, c, g, or t
  misc_feature (1325)..(1328): n is a, c, g, or t
  misc_feature (1333)..(1342): n is a, c, g, or t
tagagaaattactatgagaggatcgcatcaccatcaccatcacggatcctatttaggtgacactatagaatcgtcgacccacgcgtccgggaccaggcagccactttcctggtgctctctgggcccagctggtgctgtagggccacgcaggcaggggcgtcaaggggtttctctgcccaaggaagacagaacatggagaaccgtcagggcaggaaccccacagactgtcccttccagcccacactctgccacctcctggccctgtcccaattctgagccaaggcctccccgaggcagaagttgcctggtcctctgtccccacagtgacctgactgggggtgagggagaaggaggagagagcccatgtgtggtgtgtgtgcccctgagaacttcgtggtgactgcctttgggagcccgcaggtggccagaggcaggggtagctgagttcctggagaccccttttttgcccccaggttccccagagggcaacgccatcagtagcagtgtggtgtttcaggcagagctctggccaggctgtgccagtgtgtcccggacgcatcactaaggaagagagagtttatttagtcaactggcccaaggcagcgaggcttctacagtcccacaccccatagccgcctgggctggggcttactgggggctgaaggttctggacatgaacaagggtcaggtagaagagaaaggcttcccctacaccccagcctcctgctgtcccctgaagcccaggactgcgttgtatgctttccatccactcaccttaccccatagcatcttgcggcccaaaaaccanagccatttgtctcanaccctaaatcaataatcacaaaccccaaaacgggananagcantgaaaacatgcanggctgtgnacgggggaanggttgtggcgggtgttctgangctgaaaagacacctatatgcgtatttcntctanacacatcaccccccttntatantcttaanccatgactancctggnggcgtgtaaatttctgnccnntttnaccccctcatgngcttcttctgaaaanngaangtnantgtttnaaaactggnaaaattnnnccccnnttattgnaaaaaaanntgnaaancttggaaatttntttttttnctgntttccaaagnntncnnaaaaaancnaaannttnaangggggggggggggggggggnaannnngnnccccccngggggggggntnnnngnnnnntnnnnntttnnnnnnggnnaanttttnnnntttntntttttntnnccnnaaaaaaaaannnnntttnnnntnnnnnnnnnnnnnnnnnnnnaaaannnnaaaannnnnnnnnn

SEQ ID NO: 655 - DNA, 1356 bp, Homo Sapiens
  misc_feature (876)..(876): n is a, c, g, or t
  misc_feature (906)..(906): n is a, c, g, or t
  misc_feature (920)..(921): n is a, c, g, or t
  misc_feature (925)..(925): n is a, c, g, or t
  misc_feature (927)..(927): n is a, c, g, or t
  misc_feature (932)..(932): n is a, c, g, or t
  misc_feature (952)..(952): n is a, c, g, or t
  misc_feature (955)..(955): n is a, c, g, or t
  misc_feature (957)..(957): n is a, c, g, or t
  misc_feature (1013)..(1013): n is a, c, g, or t
  misc_feature (1020)..(1020): n is a, c, g, or t
  misc_feature (1029)..(1029): n is a, c, g, or t
  misc_feature (1032)..(1032): n is a, c, g, or t
  misc_feature (1048)..(1049): n is a, c, g, or t
  misc_feature (1060)..(1060): n is a, c, g, or t
  misc_feature (1068)..(1068): n is a, c, g, or t
  misc_feature (1070)..(1070): n is a, c, g, or t
  misc_feature (1087)..(1087): n is a, c, g, or t
  misc_feature (1096)..(1096): n is a, c, g, or t
  misc_feature (1105)..(1105): n is a, c, g, or t
  misc_feature (1111)..(1111): n is a, c, g, or t
  misc_feature (1124)..(1125): n is a, c, g, or t
  misc_feature (1136)..(1136): n is a, c, g, or t
  misc_feature (1143)..(1143): n is a, c, g, or t
  misc_feature (1147)..(1148): n is a, c, g, or t
  misc_feature (1157)..(1158): n is a, c, g, or t
  misc_feature (1163)..(1163): n is a, c, g, or t
  misc_feature (1170)..(1170): n is a, c, g, or t
  misc_feature (1175)..(1175): n is a, c, g, or t
  misc_feature (1184)..(1184): n is a, c, g, or t
  misc_feature (1190)..(1190): n is a, c, g, or t
  misc_feature (1192)..(1193): n is a, c, g, or t
  misc_feature (1195)..(1195): n is a, c, g, or t
  misc_feature (1223)..(1223): n is a, c, g, or t
  misc_feature (1225)..(1225): n is a, c, g, or t
  misc_feature (1234)..(1234): n is a, c, g, or t
  misc_feature (1238)..(1238): n is a, c, g, or t
  misc_feature (1247)..(1247): n is a, c, g, or t
  misc_feature (1254)..(1255): n is a, c, g, or t
  misc_feature (1258)..(1258): n is a, c, g, or t
  misc_feature (1262)..(1267): n is a, c, g, or t
  misc_feature (1271)..(1271): n is a, c, g, or t
  misc_feature (1273)..(1273): n is a, c, g, or t
  misc_feature (1278)..(1279): n is a, c, g, or t
  misc_feature (1282)..(1282): n is a, c, g, or t
  misc_feature (1288)..(1288): n is a, c, g, or t
  misc_feature (1300)..(1300): n is a, c, g, or t
  misc_feature (1305)..(1305): n is a, c, g, or t
  misc_feature (1310)..(1310): n is a, c, g, or t
  misc_feature (1330)..(1331): n is a, c, g, or t
  misc_feature (1333)..(1334): n is a, c, g, or t
  misc_feature (1337)..(1337): n is a, c, g, or t
  misc_feature (1340)..(1344): n is a, c, g, or t
  misc_feature (1347)..(1348): n is a, c, g, or t
  misc_feature (1350)..(1353): n is a, c, g, or t
  misc_feature (1356)..(1356): n is a, c, g, or t
gagaaattactatgagaggatcgcatcaccatcaccatcacggatcctatttaggtgacactatagaatcgtcgacccacgcgtccgcagggtctccggtaggggaaggcactggatcgcctcccaagtggcagattggtgagcaggaatttgaagccctcatgcggatgctcgataatctgggctacagaactggctacccttatcgataccctgctctgagagagaagtctaaaaaatacagcgatgtggaggttcctgctagtgtcacaggttactcctttgctagtgacggtgattcgggcacttgctccccactcagacacagttttcagaagcagcagcgggagaagacaagatggctgaactctggccggggcgacgaagcttccgaggaagggcagaatggaagcagtcccaagtcgaagactaagtggactaaagaggatggacatagaacttccacctctgctgtccctaacctgtttgttccattgaacactaacccaaaagaggtccaggagatgaggaacaagatccgagagcagaatttacaggacattaagacggctggccctcagtcccaggttttgtgtggtgtagtgatggacaggagcctcgtccaggatgcacctctctctgactgtacggaaactatcgaagggctcgagcttacagagcagacctttagtcccgctaaatctctctcttttagaaagggagagctggtgacggcctccaaggccatcattgaaaaggagtaccagccccacgtcattgtgagcaccacgggccccaaccccttcaccacactcacagaccgtgagctggaggagtaccgcagggaggtggagaggaagcaaaagggctctgaanaaaatctggacgaggctagagaaccgaaangaaaagagtcctcnnaacnancctgnggttcccccacccgcctccnagnantcccatcaagctggaagaaccaggaaacggatgccctaaaaaagtacctgttaccntaacctngtgccgganccnaatactggaaaagaanntgatgctgccncctttaancnaactccccccgaatttntcccctgangaaacctcnaaaaancccggcttcccannttaaaaaaggngaaaaancccnnaacccccannccccntggaggnccctnatgggggcngccccnanncncccccaaacccaccccgggggtgaaaangngcccccccntttnaagaggggnccccccnnaancctnnnnnnaggntntcccnnaantccccncaaaaaaaaaanttccnccccncttttaaaaaaaaaaaaaanncnnaanccnnnnnaanntnnnnggn

SEQ ID NO: 656 - DNA, 1427 bp, Homo Sapiens
  misc_feature (15)..(15): n is a, c, g, or t
  misc_feature (17)..(17): n is a, c, g, or t
  misc_feature (687)..(687): n is a, c, g, or t
  misc_feature (695)..(695): n is a, c, g, or t
  misc_feature (771)..(771): n is a, c, g, or t
  misc_feature (834)..(834): n is a, c, g, or t
  misc_feature (845)..(845): n is a, c, g, or t
  misc_feature (849)..(849): n is a, c, g, or t
  misc_feature (854)..(854): n is a, c, g, or t
  misc_feature (858)..(858): n is a, c, g, or t
  misc_feature (888)..(888): n is a, c, g, or t
  misc_feature (891)..(891): n is a, c, g, or t
  misc_feature (894)..(894): n is a, c, g, or t
  misc_feature (900)..(900): n is a, c, g, or t
  misc_feature (910)..(910): n is a, c, g, or t
  misc_feature (914)..(914): n is a, c, g, or t
  misc_feature (917)..(917): n is a, c, g, or t
  misc_feature (923)..(923): n is a, c, g, or t
  misc_feature (929)..(929): n is a, c, g, or t
  misc_feature (931)..(931): n is a, c, g, or t
  misc_feature (939)..(939): n is a, c, g, or t
  misc_feature (943)..(943): n is a, c, g, or t
  misc_feature (954)..(954): n is a, c, g, or t
  misc_feature (959)..(959): n is a, c, g, or t
  misc_feature (991)..(991): n is a, c, g, or t
  misc_feature (997)..(997): n is a, c, g, or t
  misc_feature (1004)..(1005): n is a, c, g, or t
  misc_feature (1011)..(1011): n is a, c, g, or t
  misc_feature (1013)..(1013): n is a, c, g, or t
  misc_feature (1027)..(1027): n is a, c, g, or t
  misc_feature (1032)..(1032): n is a, c, g, or t
  misc_feature (1046)..(1046): n is a, c, g, or t
  misc_feature (1054)..(1054): n is a, c, g, or t
  misc_feature (1065)..(1065): n is a, c, g, or t
  misc_feature (1075)..(1076): n is a, c, g, or t
  misc_feature (1083)..(1084): n is a, c, g, or t
  misc_feature (1089)..(1090): n is a, c, g, or t
  misc_feature (1093)..(1093): n is a, c, g, or t
  misc_feature (1099)..(1099): n is a, c, g, or t
  misc_feature (1104)..(1104): n is a, c, g, or t
  misc_feature (1106)..(1107): n is a, c, g, or t
  misc_feature (1109)..(1110): n is a, c, g, or t
  misc_feature (1120)..(1120): n is a, c, g, or t
  misc_feature (1125)..(1125): n is a, c, g, or t
  misc_feature (1128)..(1130): n is a, c, g, or t
  misc_feature (1136)..(1137): n is a, c, g, or t
  misc_feature (1142)..(1142): n is a, c, g, or t
  misc_feature (1146)..(1146): n is a, c, g, or t
  misc_feature (1148)..(1149): n is a, c, g, or t
  misc_feature (1151)..(1151): n is a, c, g, or t
  misc_feature (1171)..(1171): n is a, c, g, or t
  misc_feature (1173)..(1173): n is a, c, g, or t
  misc_feature (1184)..(1184): n is a, c, g, or t
  misc_feature (1187)..(1187): n is a, c, g, or t
  misc_feature (1189)..(1189): n is a, c, g, or t
  misc_feature (1198)..(1198): n is a, c, g, or t
  misc_feature (1202)..(1202): n is a, c, g, or t
  misc_feature (1207)..(1207): n is a, c, g, or t
  misc_feature (1217)..(1217): n is a, c, g, or t
  misc_feature (1223)..(1223): n is a, c, g, or t
  misc_feature (1231)..(1233): n is a, c, g, or t
  misc_feature (1237)..(1238): n is a, c, g, or t
  misc_feature (1246)..(1246): n is a, c, g, or t
  misc_feature (1248)..(1248): n is a, c, g, or t
  misc_feature (1253)..(1253): n is a, c, g, or t
  misc_feature (1277)..(1277): n is a, c, g, or t
  misc_feature (1280)..(1280): n is a, c, g, or t
  misc_feature (1291)..(1291): n is a, c, g, or t
  misc_feature (1306)..(1309): n is a, c, g, or t
  misc_feature (1311)..(1311): n is a, c, g, or t
  misc_feature (1317)..(1317): n is a, c, g, or t
  misc_feature (1333)..(1333): n is a, c, g, or t
  misc_feature (1349)..(1349): n is a, c, g, or t
  misc_feature (1358)..(1358): n is a, c, g, or t
  misc_feature (1360)..(1360): n is a, c, g, or t
  misc_feature (1364)..(1364): n is a, c, g, or t
  misc_feature (1367)..(1367): n is a, c, g, or t
  misc_feature (1369)..(1369): n is a, c, g, or t
  misc_feature (1377)..(1378): n is a, c, g, or t
  misc_feature (1384)..(1384): n is a, c, g, or t
  misc_feature (1408)..(1408): n is a, c, g, or t
  misc_feature (1421)..(1422): n is a, c, g, or t
aaaattagaggaaantnactatgagaggatcgcatcaccatcaccatcacgggatcctatttaggtgacactatagaatcgtcgacccacgcgtccggcttcgtggaggttggccgggtggcctatgtctcctttggacctcatgccggaaaattggtcgcgattgtagatgttattgatcagaacagggctttggtcgatggaccttgcactcaagtgaggagacaggccatgcctttcaagtgcatgcagctcactgatttcatcctcaagtttccgcacagtgcccaccagaagtatgtccgacaagcctggcagaaggcagacatcaatacaaaatgggcagccacacgatgggccaagaagattgaagccagagaaaggaaagccaagatgacagattttgatcgttttaaagttatgaaggcaaagaaaatgaggaacagaataatcaagaatgaagttaagaagcttcaaaaggcagctctcctgaaagcttctccccaaaaagcacctggtactaagggtactgctgctgctgctgctgctgctgctgctgctgctgctgctgctgctgctaaagttccagcaaaaaagatcaccgccgcgagtaaaaaggctccagcccagaaggttcctgcccagaaagccacaggccagaaagcagcgcctgctccaaaagctcanaagggtcnaaaaagctccagcccagaaagcacctgctcccaagggcatctggcaaagaaaagcataagtggcaatcataaaaantaataaaaggttcttttttgacctgtttgaaaaaaaaaaaaaaaaaaaaaaaaaaaaggcggncccctccctanaagngaagncctnattaaaccttaattagctgaacttgggacntcntgnttgaanacattccagnaatngancctccnaaaccncnctcctggntttntttcaaaaacncctcngttggccccccggggggttttttttttggggnaaaaanccaaacnnactttngnccaaaatttttccngggancttaagggaacctnaatatggnaaaaaaaaatnccccggaaannacccccnntttannaantccccnatggnanncnnaaaaaaaaantttgnggnnntttcannccctntgcncnnanggtaccctaaacccaacccntnccgcggggaanttncngcccttttntaanccccnaaaaaaaaanaacccncagttttnnncggnnctttttananttttntccccccgaaaaaggccccccccnaancttctttgggnaaaaaaaaccgaagnnnngnggaatngaaaaattttcccccnttttacccctttttcngggaaaaananaaanttntntcccttgnngaaaanccaaaatatttcggggtttctcantttttccagatgnnggggt

SEQ ID NO: 657 - DNA, 1414 bp, Homo Sapiens
  misc_feature (750)..(750): n is a, c, g, or t
  misc_feature (809)..(809): n is a, c, g, or t
  misc_feature (833)..(833): n is a, c, g, or t
  misc_feature (840)..(840): n is a, c, g, or t
  misc_feature (848)..(848): n is a, c, g, or t
  misc_feature (857)..(857): n is a, c, g, or t
  misc_feature (862)..(862): n is a, c, g, or t
  misc_feature (886)..(886): n is a, c, g, or t
  misc_feature (895)..(895): n is a, c, g, or t
  misc_feature (899)..(900): n is a, c, g, or t
  misc_feature (908)..(908): n is a, c, g, or t
  misc_feature (910)..(910): n is a, c, g, or t
  misc_feature (912)..(912): n is a, c, g, or t
  misc_feature (922)..(923): n is a, c, g, or t
  misc_feature (931)..(931): n is a, c, g, or t
  misc_feature (938)..(938): n is a, c, g, or t
  misc_feature (945)..(947): n is a, c, g, or t
  misc_feature (949)..(949): n is a, c, g, or t
  misc_feature (955)..(955): n is a, c, g, or t
  misc_feature (970)..(970): n is a, c, g, or t
  misc_feature (976)..(976): n is a, c, g, or t
  misc_feature (981)..(981): n is a, c, g, or t
  misc_feature (992)..(992): n is a, c, g, or t
  misc_feature (1002)..(1002): n is a, c, g, or t
  misc_feature (1009)..(1009): n is a, c, g, or t
  misc_feature (1012)..(1012): n is a, c, g, or t
  misc_feature (1016)..(1016): n is a, c, g, or t
  misc_feature (1023)..(1023): n is a, c, g, or t
  misc_feature (1026)..(1027): n is a, c, g, or t
  misc_feature (1041)..(1041): n is a, c, g, or t
  misc_feature (1043)..(1043): n is a, c, g, or t
  misc_feature (1053)..(1054): n is a, c, g, or t
  misc_feature (1063)..(1063): n is a, c, g, or t
  misc_feature (1076)..(1076): n is a, c, g, or t
  misc_feature (1082)..(1082): n is a, c, g, or t
  misc_feature (1092)..(1092): n is a, c, g, or t
  misc_feature (1094)..(1095): n is a, c, g, or t
  misc_feature (1098)..(1098): n is a, c, g, or t
  misc_feature (1101)..(1101): n is a, c, g, or t
  misc_feature (1106)..(1106): n is a, c, g, or t
  misc_feature (1113)..(1113): n is a, c, g, or t
  misc_feature (1121)..(1123): n is a, c, g, or t
  misc_feature (1127)..(1127): n is a, c, g, or t
  misc_feature (1134)..(1134): n is a, c, g, or t
  misc_feature (1136)..(1136): n is a, c, g, or t
  misc_feature (1142)..(1142): n is a, c, g, or t
  misc_feature (1145)..(1145): n is a, c, g, or t
  misc_feature (1147)..(1147): n is a, c, g, or t
  misc_feature (1157)..(1158): n is a, c, g, or t
  misc_feature (1160)..(1160): n is a, c, g, or t
  misc_feature (1165)..(1165): n is a, c, g, or t
  misc_feature (1176)..(1176): n is a, c, g, or t
  misc_feature (1178)..(1178): n is a, c, g, or t
  misc_feature (1181)..(1181): n is a, c, g, or t
  misc_feature (1195)..(1195): n is a, c, g, or t
  misc_feature (1197)..(1197): n is a, c, g, or t
  misc_feature (1217)..(1217): n is a, c, g, or t
  misc_feature (1227)..(1227): n is a, c, g, or t
  misc_feature (1240)..(1240): n is a, c, g, or t
  misc_feature (1260)..(1260): n is a, c, g, or t
  misc_feature (1263)..(1263): n is a, c, g, or t
  misc_feature (1266)..(1266): n is a, c, g, or t
  misc_feature (1270)..(1270): n is a, c, g, or t
  misc_feature (1272)..(1272): n is a, c, g, or t
  misc_feature (1290)..(1290): n is a, c, g, or t
  misc_feature (1296)..(1296): n is a, c, g, or t
  misc_feature (1304)..(1304): n is a, c, g, or t
  misc_feature (1306)..(1307): n is a, c, g, or t
  misc_feature (1324)..(1325): n is a, c, g, or t
  misc_feature (1331)..(1331): n is a, c, g, or t
  misc_feature (1337)..(1338): n is a, c, g, or t
  misc_feature (1344)..(1344): n is a, c, g, or t
  misc_feature (1346)..(1347): n is a, c, g, or t
  misc_feature (1352)..(1352): n is a, c, g, or t
  misc_feature (1366)..(1367): n is a, c, g, or t
  misc_feature (1369)..(1369): n is a, c, g, or t
  misc_feature (1371)..(1372): n is a, c, g, or t
  misc_feature (1378)..(1378): n is a, c, g, or t
  misc_feature (1380)..(1380): n is a, c, g, or t
  misc_feature (1387)..(1388): n is a, c, g, or t
  misc_feature (1392)..(1392): n is a, c, g, or t
  misc_feature (1395)..(1395): n is a, c, g, or t
  misc_feature (1404)..(1404): n is a, c, g, or t
  misc_feature (1406)..(1406): n is a, c, g, or t
  misc_feature (1408)..(1408): n is a, c, g, or t
  misc_feature (1410)..(1411): n is a, c, g, or t
  misc_feature (1414)..(1414): n is a, c, g, or t
agagagaattactatgagaggatcgcatcaccatcaccatcacggatcctatttaggtgacactatagaatcgtcgacccacgcgtccggggacgcgggtttctgcctcaggccctgccctgctctactctgcgctctctgcccgcgccgccgccgcctcagcctcggccctgcgctgcgcgcccggcccgtgctgccatggcctgccgcccgcgaagcccgccgaggcatcagagccgctgcgacggtgacgccagcccgccgtcccccgcgcgatggagcctgggacggaagcgcagagccgacggcaggcgctggaggcccgaagacgccgaggaggcagagcaccgcggcgccgagcgcagacccgagagctttaccactcctgaaggccctaaaccccgttccagatgctctgactgggcaagtgcagttgaagaagatgaaatgaggaccagagttaacaaagaaatggcaagatataaaaggaaactcctcatcaatgactttggaagagagagaaaatcatcatcaggaagttctgattcaaaggagtctatgtctactgtgccggctgactttgagacagatgaaagtgtcctaatgaggagacagaagcagatcaactatgggaagaacacaattgcctacgatcgttatattaaagaagtcccaagacaccttcgacaacctggcattcatcccaagacccctaataaatttaagaagtatagtcgacgttcatgggancagcaaatcaaactctggaaggtggctctgcattttttgggatcctccagcggaagaangatgtgatttgcaagaaattacanccctgtnaaccttgnatctgcaanaaagnaagctcctaagccccaagaacaancttcttcangaannactttgantntntacttttggnnccacccanccaaggntgaaaannnantggaanagtcaagttggaaanaatganttttnatttgaaaacnttgttttaantgaaccnttnaaanaattttncanncaatgaaacttaantncccccctggnngggccaagnaaaaaaaaaaaancctccncccccaaatnanntgnaanggttnggccaancaccaaannntggngtggggncnttttanctngngggttttttnntnaccantccttttcccncnggncaaattatttttgncntttttctttaaaaaattttnttttttatgntaagggggaatantttctccggtttaaatttgnaanggnggcntnctcccgaaaaattatttnaatctntttttccnanntttttgtttaaaccccnnttcccnccgggnnatacgnannctttnataattgtttttcnngnanntttttntnttttttnngggngantttttatantncncnntan

SEQ ID NO: 658 - DNA, 1244 bp, Homo Sapiens
  misc_feature (787)..(864): n is a, c, g, or t
  misc_feature (866)..(874): n is a, c, g, or t
  misc_feature (877)..(890): n is a, c, g, or t
  misc_feature (895)..(899): n is a, c, g, or t
  misc_feature (902)..(903): n is a, c, g, or t
  misc_feature (905)..(908): n is a, c, g, or t
  misc_feature (911)..(911): n is a, c, g, or t
  misc_feature (915)..(916): n is a, c, g, or t
  misc_feature (921)..(922): n is a, c, g, or t
  misc_feature (924)..(925): n is a, c, g, or t
  misc_feature (927)..(927): n is a, c, g, or t
  misc_feature (929)..(932): n is a, c, g, or t
  misc_feature (935)..(936): n is a, c, g, or t
  misc_feature (945)..(947): n is a, c, g, or t
  misc_feature (952)..(952): n is a, c, g, or t
  misc_feature (957)..(961): n is a, c, g, or t
  misc_feature (969)..(969): n is a, c, g, or t
  misc_feature (975)..(976): n is a, c, g, or t
  misc_feature (978)..(983): n is a, c, g, or t
  misc_feature (993)..(993): n is a, c, g, or t
  misc_feature (1000)..(1001): n is a, c, g, or t
  misc_feature (1003)..(1004): n is a, c, g, or t
  misc_feature (1007)..(1008): n is a, c, g, or t
  misc_feature (1010)..(1010): n is a, c, g, or t
  misc_feature (1012)..(1018): n is a, c, g, or t
  misc_feature (1021)..(1021): n is a, c, g, or t
  misc_feature (1023)..(1027): n is a, c, g, or t
  misc_feature (1031)..(1031): n is a, c, g, or t
  misc_feature (1036)..(1037): n is a, c, g, or t
  misc_feature (1040)..(1041): n is a, c, g, or t
  misc_feature (1045)..(1046): n is a, c, g, or t
  misc_feature (1048)..(1057): n is a, c, g, or t
  misc_feature (1060)..(1061): n is a, c, g, or t
  misc_feature (1069)..(1075): n is a, c, g, or t
  misc_feature (1078)..(1080): n is a, c, g, or t
  misc_feature (1085)..(1087): n is a, c, g, or t
  misc_feature (1089)..(1089): n is a, c, g, or t
  misc_feature (1092)..(1092): n is a, c, g, or t
  misc_feature (1098)..(1100): n is a, c, g, or t
  misc_feature (1103)..(1103): n is a, c, g, or t
  misc_feature (1108)..(1109): n is a, c, g, or t
  misc_feature (1111)..(1112): n is a, c, g, or t
  misc_feature (1115)..(1116): n is a, c, g, or t
  misc_feature (1120)..(1121): n is a, c, g, or t
  misc_feature (1124)..(1126): n is a, c, g, or t
  misc_feature (1131)..(1136): n is a, c, g, or t
  misc_feature (1140)..(1158): n is a, c, g, or t
  misc_feature (1161)..(1178): n is a, c, g, or t
  misc_feature (1180)..(1181): n is a, c, g, or t
  misc_feature (1187)..(1192): n is a, c, g, or t
  misc_feature (1195)..(1196): n is a, c, g, or t
  misc_feature (1213)..(1215): n is a, c, g, or t
  misc_feature (1217)..(1223): n is a, c, g, or t
  misc_feature (1230)..(1230): n is a, c, g, or t
  misc_feature (1233)..(1233): n is a, c, g, or t
  misc_feature (1240)..(1240): n is a, c, g, or t
  misc_feature (1244)..(1244): n is a, c, g, or t
tagagaaattactatgagaggatcgcatcaccatcaccatcacggatcctatttaggtgacactatagaatcgtcgacccacgcgtccgggcgggaaggctctggcttgggacgaaagtgtcaaggcattacggctcccattgaggctcaagttcggctaaagggagctggcctaggagccaaaggcagcgcatatggtttgtcgggcgccgattcctacaaagatgctgtccggaaagccatgtttgcccggttcactgagatggagtgagagagagagagagagagagatgacaaggagcacaagaagtggtccatctcccgaattcgctgttaccgcctgtctctttaagggcatgccttgtgctgttaatagatcttagggtgaaccacttcattctgcagggttctccctcccaccttaaagaagttccccttatgtgggttgcctggtgaatggccttccttcccgccagagggcttgtgaacagaccggagaggacagtggattgtttatactccagtgtacatagtgtaatgtagcgtgtttacatgtgtagcctatgttgtggtccatcagcccctcacattcctaggggtttgagatgctgtaggtggtatgtgacaccaaagccacctctgtcatttgttgtgatgtcttttcttggcaaaagccttgtgtatatttgtatattacacatttgtacagaattttggaagattttcagtctagttgccaaatctggctcctttacaaaagaaataccttgagaaatgggaaaaaaannnnnnnnnnnnnnnnnnnnnnnnnnnnnnnnnnnnnnnnnnnnnnnnnnnnnnnnnnnnnnnnnnnnnnnnnnnnnngnnnnnnnnnccnnnnnnnnnnnnnnaaaannnnnaannannnnaanttgnnacccnngnnanannnnccnnaaaaaaacnnnaaaanccccnnnnnattttttnaaaaanntnnnnnncccccggggnttttttnntnnttnnantnnnnnnnaancnnnnnaaanttttnnggnntttnngnnnnnnnnnnggnnaaaaaaannnnnnnaannnccccnnntnaancccccnnnggnccccnnannaanntttnnaannnttttnnnnnntttnnnnnnnnnnnnnnnnnnnaannnnnnnnnnnnnnnnnngnntttttnnnnnnttnnaaaaaaaaaaaaaaaannntnnnnnnnttttttnccnttttttncccn

SEQ ID NO: 659 - DNA, 1244 bp, Homo Sapiens
  misc_feature (716)..(716): n is a, c, g, or t
  misc_feature (760)..(760): n is a, c, g, or t
  misc_feature (900)..(900): n is a, c, g, or t
  misc_feature (902)..(902): n is a, c, g, or t
  misc_feature (921)..(921): n is a, c, g, or t
  misc_feature (923)..(923): n is a, c, g, or t
  misc_feature (949)..(949): n is a, c, g, or t
  misc_feature (955)..(955): n is a, c, g, or t
  misc_feature (957)..(957): n is a, c, g, or t
  misc_feature (970)..(970): n is a, c, g, or t
  misc_feature (976)..(976): n is a, c, g, or t
  misc_feature (986)..(986): n is a, c, g, or t
  misc_feature (988)..(988): n is a, c, g, or t
  misc_feature (1030)..(1030): n is a, c, g, or t
  misc_feature (1032)..(1032): n is a, c, g, or t
  misc_feature (1034)..(1034): n is a, c, g, or t
  misc_feature (1036)..(1036): n is a, c, g, or t
  misc_feature (1044)..(1045): n is a, c, g, or t
  misc_feature (1049)..(1049): n is a, c, g, or t
  misc_feature (1051)..(1052): n is a, c, g, or t
  misc_feature (1054)..(1054): n is a, c, g, or t
  misc_feature (1058)..(1058): n is a, c, g, or t
  misc_feature (1061)..(1061): n is a, c, g, or t
  misc_feature (1065)..(1065): n is a, c, g, or t
  misc_feature (1081)..(1081): n is a, c, g, or t
  misc_feature (1097)..(1097): n is a, c, g, or t
  misc_feature (1102)..(1103): n is a, c, g, or t
  misc_feature (1110)..(1110): n is a, c, g, or t
  misc_feature (1114)..(1114): n is a, c, g, or t
  misc_feature (1124)..(1124): n is a, c, g, or t
  misc_feature (1132)..(1133): n is a, c, g, or t
  misc_feature (1138)..(1138): n is a, c, g, or t
  misc_feature (1142)..(1142): n is a, c, g, or t
  misc_feature (1144)..(1144): n is a, c, g, or t
  misc_feature (1147)..(1147): n is a, c, g, or t
  misc_feature (1149)..(1149): n is a, c, g, or t
  misc_feature (1159)..(1159): n is a, c, g, or t
  misc_feature (1167)..(1167): n is a, c, g, or t
  misc_feature (1179)..(1179): n is a, c, g, or t
  misc_feature (1182)..(1182): n is a, c, g, or t
  misc_feature (1184)..(1184): n is a, c, g, or t
  misc_feature (1187)..(1187): n is a, c, g, or t
  misc_feature (1189)..(1189): n is a, c, g, or t
  misc_feature (1196)..(1197): n is a, c, g, or t
  misc_feature (1206)..(1206): n is a, c, g, or t
  misc_feature (1210)..(1210): n is a, c, g, or t
  misc_feature (1213)..(1214): n is a, c, g, or t
  misc_feature (1223)..(1224): n is a, c, g, or t
  misc_feature (1227)..(1227): n is a, c, g, or t
  misc_feature (1231)..(1231): n is a, c, g, or t
  misc_feature (1244)..(1244): n is a, c, g, or t
gagaaattactatgagaggatcgcatcaccatcaccatcacggatcctatttaggtgacactatagaatcgtcgacccacgcgtccgggccgctgtacatgagcaccaagaacaccatactgaaagcctacgatgggcgtttcaaggacatcttccaggagatctttgacaagcactataagaccgacttcgacaagaataagatctggtatgagcaccggctcattgatgacatggtggctcaggtcctcaagtcttcgggtggctttgtgtgggcctgcaagaactatgacggagatgtgcagtcagacatcctggcccagggctttggctcccttggcctgatgacgtccgtcctggtctgccctgatgggaagacgattgaggctgaggccgctcatgggaccgtcacccgccactatcgggagcaccagaagggccggcccaccagcaccaaccccatcgccagcatctttgcctggacacgtggcctggagcaccgggggaagctggatgggaaccaagacctcatcaggtttgcccagatgctggagaaggtgtgcgtggagacggtggagagtggagccatgaccaaggacctggcgggctgcattcacggcctcagcaatgtgaagctgaacgagcacttcctgaacaccacggacttcctcgacaccatcaagagcaacctggacagagccctgggcaggcagtanggggaggcgccacccatggctgcagtggaggggccagggctganccggcgggtcctcctgagcgcggcagaaggtgagcctcacagcccctctctggaggcctttctaggggatgtttttttataagccagatgtttttaaaaagcatatgtgtgttttcccctcatgggggacgtgaggcagnancagtgcgtttttacctcancnagtcaatatgttttgcatactggaantttaantngcccttggaaaanatgggngccatatttnanctactaaaaagctcttccaaaaaaaaaaaaaaaaaaaagggngncncnccctaaanngagncnnantaanctnaatnaactgaacttggaacncctgttgaaaaatccngtaanngaccccnaaancccctctggnaatttttnnaaaancctngnttngnccccgggggntttttttnttgggggaaaanccnanccnantttgggnnaaatttttngggnccnnagggaaccnnaangggnaaaaaaaaacctn

SEQ ID NO: 660 - DNA, 1352 bp, Homo Sapiens
  misc_feature (892)..(892): n is a, c, g, or t
  misc_feature (902)..(902): n is a, c, g, or t
  misc_feature (905)..(905): n is a, c, g, or t
  misc_feature (925)..(925): n is a, c, g, or t
  misc_feature (956)..(956): n is a, c, g, or t
  misc_feature (974)..(974): n is a, c, g, or t
  misc_feature (976)..(976): n is a, c, g, or t
  misc_feature (979)..(979): n is a, c, g, or t
  misc_feature (983)..(983): n is a, c, g, or t
  misc_feature (996)..(996): n is a, c, g, or t
  misc_feature (1003)..(1004): n is a, c, g, or t
  misc_feature (1014)..(1014): n is a, c, g, or t
  misc_feature (1039)..(1039): n is a, c, g, or t
  misc_feature (1041)..(1041): n is a, c, g, or t
  misc_feature (1047)..(1047): n is a, c, g, or t
  misc_feature (1049)..(1049): n is a, c, g, or t
  misc_feature (1053)..(1053): n is a, c, g, or t
  misc_feature (1064)..(1064): n is a, c, g, or t
  misc_feature (1080)..(1080): n is a, c, g, or t
  misc_feature (1082)..(1082): n is a, c, g, or t
  misc_feature (1091)..(1093): n is a, c, g, or t
  misc_feature (1099)..(1099): n is a, c, g, or t
  misc_feature (1120)..(1120): n is a, c, g, or t
  misc_feature (1124)..(1124): n is a, c, g, or t
  misc_feature (1126)..(1126): n is a, c, g, or t
  misc_feature (1132)..(1132): n is a, c, g, or t
  misc_feature (1136)..(1136): n is a, c, g, or t
  misc_feature (1140)..(1140): n is a, c, g, or t
  misc_feature (1142)..(1142): n is a, c, g, or t
  misc_feature (1163)..(1163): n is a, c, g, or t
  misc_feature (1165)..(1165): n is a, c, g, or t
  misc_feature (1173)..(1173): n is a, c, g, or t
  misc_feature (1180)..(1180): n is a, c, g, or t
  misc_feature (1188)..(1188): n is a, c, g, or t
  misc_feature (1190)..(1190): n is a, c, g, or t
  misc_feature (1192)..(1192): n is a, c, g, or t
  misc_feature (1196)..(1196): n is a, c, g, or t
  misc_feature (1213)..(1214): n is a, c, g, or t
  misc_feature (1219)..(1220): n is a, c, g, or t
  misc_feature (1225)..(1225): n is a, c, g, or t
  misc_feature (1233)..(1233): n is a, c, g, or t
  misc_feature (1235)..(1235): n is a, c, g, or t
  misc_feature (1246)..(1246): n is a, c, g, or t
  misc_feature (1253)..(1254): n is a, c, g, or t
  misc_feature (1256)..(1256): n is a, c, g, or t
  misc_feature (1258)..(1259): n is a, c, g, or t
  misc_feature (1265)..(1265): n is a, c, g, or t
  misc_feature (1288)..(1288): n is a, c, g, or t
  misc_feature (1292)..(1292): n is a, c, g, or t
  misc_feature (1296)..(1296): n is a, c, g, or t
  misc_feature (1299)..(1299): n is a, c, g, or t
  misc_feature (1303)..(1304): n is a, c, g, or t
  misc_feature (1313)..(1314): n is a, c, g, or t
  misc_feature (1326)..(1326): n is a, c, g, or t
  misc_feature (1328)..(1328): n is a, c, g, or t
  misc_feature (1331)..(1331): n is a, c, g, or t
  misc_feature (1337)..(1338): n is a, c, g, or t
  misc_feature (1348)..(1348): n is a, c, g, or t
gagaaattactatgagaggatcgcatcaccatcaccatcacggatcctatttaggtgacactatagaatcgtcgacccacgcgtccggcagcgtcaggtgttcagctcccctgggaccactggtcccttcattagtgacgtatttcatcatcagtttagagagttcggcatgcttacaggcagttattgttctaggtgttagctttctgggtgtacggagcagctctaagccggcaacatggcccggttgcccttgcgatcaaagagaagagggctgggcgctccatgatttagcctgaggctcttcaaacatccattctgcttccacgcatggcttctgccattggttctcttcccccagcaccctgaaacgacagaaacaagcaatccgattccagaaaattcggaggcaaatggaggcgcctggtgccccgcccaggaccctgacgtgggaagccatggagcagatacggtatttacatgaggaatttccagagtcctggtcagttcccaggttggctgaaggctttgatgtcagcactgatgtgatccgaagagttttaaaaagcaagtttttacccacattggagcagaagctgaagcaggatcaaaaagtccttaagaaagctgggcttgcccactcgctgcagcacctccggggctctggaaatacctcaaagctgctccctgcaggccactctgtatcaggctctttgcttatgccagggcatgaagcctcatctaaagacccaaatcacagcacagctttgaaagtgatagagtcagacactcacaggacaaatacaccaaggagaaggaagggaaaaaataaagaaatccaggacctggaggagagctttgtgcctgttgctgcacccctaggtcatccaanagagctgcanaantactccagtgattctgaaanccccaaaagaactggcagtggtgcgttgccnagtggtcaaaactggagnanttnaagncaaagaaccaaanaacttcnncaccaaatantgcaaagggcccaaaattctttganancacggnanttcntgtaaaaattnaatcgggctggcttangnaaagcctcnnnaaacanctgggcaatataatgtaatgnaaancnggattncgcnatgnanaaccccttgaaaaaaaaaggntnaacctgantgggganaaaaactncngnaaantcaactccgggggaagnncccanngaacncggaaaantnaaaaccccctntttttanncncnnggggtnaaaaccccccggggggggggggnaaantttnggnaaanncattttttnnaaaaaaaaaaantnccnccaccnntttttttaanaaaa

SEQ ID NO: 661 - DNA, 1333 bp, Homo Sapiens
  misc_feature (764)..(764): n is a, c, g, or t
  misc_feature (788)..(788): n is a, c, g, or t
  misc_feature (848)..(848): n is a, c, g, or t
  misc_feature (877)..(877): n is a, c, g, or t
  misc_feature (900)..(900): n is a, c, g, or t
  misc_feature (902)..(902): n is a, c, g, or t
  misc_feature (905)..(905): n is a, c, g, or t
  misc_feature (945)..(946): n is a, c, g, or t
  misc_feature (983)..(983): n is a, c, g, or t
  misc_feature (987)..(987): n is a, c, g, or t
  misc_feature (989)..(990): n is a, c, g, or t
  misc_feature (996)..(996): n is a, c, g, or t
  misc_feature (999)..(999): n is a, c, g, or t
  misc_feature (1004)..(1004): n is a, c, g, or t
  misc_feature (1019)..(1019): n is a, c, g, or t
  misc_feature (1027)..(1027): n is a, c, g, or t
  misc_feature (1034)..(1034): n is a, c, g, or t
  misc_feature (1046)..(1046): n is a, c, g, or t
  misc_feature (1053)..(1054): n is a, c, g, or t
  misc_feature (1056)..(1056): n is a, c, g, or t
  misc_feature (1074)..(1074): n is a, c, g, or t
  misc_feature (1086)..(1086): n is a, c, g, or t
  misc_feature (1089)..(1089): n is a, c, g, or t
  misc_feature (1096)..(1096): n is a, c, g, or t
  misc_feature (1098)..(1098): n is a, c, g, or t
  misc_feature (1108)..(1108): n is a, c, g, or t
  misc_feature (1114)..(1115): n is a, c, g, or t
  misc_feature (1124)..(1124): n is a, c, g, or t
  misc_feature (1126)..(1126): n is a, c, g, or t
  misc_feature (1136)..(1137): n is a, c, g, or t
  misc_feature (1144)..(1145): n is a, c, g, or t
  misc_feature (1149)..(1149): n is a, c, g, or t
  misc_feature (1152)..(1152): n is a, c, g, or t
  misc_feature (1155)..(1156): n is a, c, g, or t
  misc_feature (1171)..(1171): n is a, c, g, or t
  misc_feature (1178)..(1178): n is a, c, g, or t
  misc_feature (1180)..(1180): n is a, c, g, or t
  misc_feature (1183)..(1183): n is a, c, g, or t
  misc_feature (1185)..(1185): n is a, c, g, or t
  misc_feature (1187)..(1187): n is a, c, g, or t
  misc_feature (1192)..(1192): n is a, c, g, or t
  misc_feature (1202)..(1202): n is a, c, g, or t
  misc_feature (1205)..(1205): n is a, c, g, or t
  misc_feature (1211)..(1211): n is a, c, g, or t
  misc_feature (1213)..(1216): n is a, c, g, or t
  misc_feature (1220)..(1220): n is a, c, g, or t
  misc_feature (1225)..(1228): n is a, c, g, or t
  misc_feature (1239)..(1241): n is a, c, g, or t
  misc_feature (1247)..(1249): n is a, c, g, or t
  misc_feature (1252)..(1252): n is a, c, g, or t
  misc_feature (1256)..(1257): n is a, c, g, or t
  misc_feature (1259)..(1262): n is a, c, g, or t
  misc_feature (1264)..(1264): n is a, c, g, or t
  misc_feature (1268)..(1269): n is a, c, g, or t
  misc_feature (1278)..(1278): n is a, c, g, or t
  misc_feature (1281)..(1285): n is a, c, g, or t
  misc_feature (1290)..(1291): n is a, c, g, or t
  misc_feature (1299)..(1300): n is a, c, g, or t
  misc_feature (1303)..(1304): n is a, c, g, or t
  misc_feature (1307)..(1307): n is a, c, g, or t
  misc_feature (1311)..(1313): n is a, c, g, or t
  misc_feature (1315)..(1316): n is a, c, g, or t
  misc_feature (1318)..(1318): n is a, c, g, or t
  misc_feature (1321)..(1323): n is a, c, g, or t
  misc_feature (1325)..(1325): n is a, c, g, or t
tagagaaattactatggagaggatcgcatcaccatcaccatcacggatcctatttaggtgacactatagaatcgtcgacccacgcgtccgggggtcctggtgacgagtcccgcgttctctccttgaatccactcgccagcccgccgccctctgccgccgcaccctgcacacccgcccctctcctgtgccaggaacttgctactaccagcaccatgccctaccaatatccagcactgaccccggagcagaagaaggagctgtctgacatcgctcaccgcatcgtggcacctggcaagggcatcctggctgcagatgagtccactgggagcattgccaagcggctgcagtccattggcaccgagaacaccgaggagaaccggcgcttctaccgccagctgctgctgacagctgacgaccgcgtgaacccctgcattgggggtgtcatcctcttccatgagacactctaccagaaggcggatgatgggcgtcccttcccccaagttatcaaatccaagggcggtgttgtgggcatcaaggtagacaagggcgtggtccccctggcagggacaaatggcgagactaccacccaagggttggatgggctgtctgagcgctgtgcccagtacaagaaggacggagctgacttcgccaagtggcgttgtgtgctgaagattggggaacacaccccctcagccctcgccatcatggaaaatgccaatgttctggcccgttatgccagtatctgccagcaggtgggcctgcanaatggcattgtgcccatcgtggancctgaaatcctccctgatggggaccatgacttgaagcgctgccagtatgtgaccgaaaangtgctggctgctgtctacaaggctctgantgaccaccacatctacctggaangnacnttgctgaagcccaacatggtcaccccaggccatgcttgcnntcaaaattttctcatgaagaaattgccatggggaacngtcnanngctgcnccncaaantgcccccgctgtcantgggaatnaccttcntgtctggaggcnaaatgannangaggctccataacctcangccattaaaaantgncccctgntnaaccctgggncctgannttttctaangncaaacctggnnggctttnncctnaangcnnggggggggaaaaaanaaaaacntnaangntnccaanaaaaaatttnaanaaaccntnnnnaaanctttnnnnaaggaaaaaannncaaggnnnggngggnntnnnnanaatnnttttttttnaannnnntaaannggggtttnnggnnccnaaannngnngnccnnncnttaaaaaa

SEQ ID NO: 662 - DNA, 1298 bp, Homo Sapiens
  misc_feature (2)..(2): n is a, c, g, or t
  misc_feature (789)..(789): n is a, c, g, or t
  misc_feature (873)..(873): n is a, c, g, or t
  misc_feature (881)..(881): n is a, c, g, or t
  misc_feature (902)..(902): n is a, c, g, or t
  misc_feature (918)..(918): n is a, c, g, or t
  misc_feature (951)..(951): n is a, c, g, or t
  misc_feature (956)..(956): n is a, c, g, or t
  misc_feature (987)..(987): n is a, c, g, or t
  misc_feature (991)..(992): n is a, c, g, or t
  misc_feature (994)..(994): n is a, c, g, or t
  misc_feature (1028)..(1029): n is a, c, g, or t
  misc_feature (1032)..(1032): n is a, c, g, or t
  misc_feature (1039)..(1039): n is a, c, g, or t
  misc_feature (1047)..(1047): n is a, c, g, or t
  misc_feature (1055)..(1055): n is a, c, g, or t
  misc_feature (1057)..(1057): n is a, c, g, or t
  misc_feature (1066)..(1066): n is a, c, g, or t
  misc_feature (1068)..(1068): n is a, c, g, or t
  misc_feature (1073)..(1073): n is a, c, g, or t
  misc_feature (1078)..(1080): n is a, c, g, or t
  misc_feature (1082)..(1082): n is a, c, g, or t
  misc_feature (1093)..(1094): n is a, c, g, or t
  misc_feature (1101)..(1101): n is a, c, g, or t
  misc_feature (1103)..(1103): n is a, c, g, or t
  misc_feature (1107)..(1107): n is a, c, g, or t
  misc_feature (1109)..(1109): n is a, c, g, or t
  misc_feature (1122)..(1122): n is a, c, g, or t
  misc_feature (1133)..(1133): n is a, c, g, or t
  misc_feature (1137)..(1138): n is a, c, g, or t
  misc_feature (1143)..(1143): n is a, c, g, or t
  misc_feature (1146)..(1146): n is a, c, g, or t
  misc_feature (1149)..(1149): n is a, c, g, or t
  misc_feature (1155)..(1155): n is a, c, g, or t
  misc_feature (1162)..(1162): n is a, c, g, or t
  misc_feature (1165)..(1165): n is a, c, g, or t
  misc_feature (1168)..(1168): n is a, c, g, or t
  misc_feature (1175)..(1175): n is a, c, g, or t
  misc_feature (1179)..(1179): n is a, c, g, or t
  misc_feature (1183)..(1183): n is a, c, g, or t
  misc_feature (1185)..(1185): n is a, c, g, or t
  misc_feature (1195)..(1197): n is a, c, g, or t
  misc_feature (1200)..(1200): n is a, c, g, or t
  misc_feature (1202)..(1202): n is a, c, g, or t
  misc_feature (1205)..(1207): n is a, c, g, or t
  misc_feature (1213)..(1213): n is a, c, g, or t
  misc_feature (1220)..(1220): n is a, c, g, or t
  misc_feature (1224)..(1224): n is a, c, g, or t
  misc_feature (1238)..(1239): n is a, c, g, or t
  misc_feature (1252)..(1252): n is a, c, g, or t
  misc_feature (1255)..(1255): n is a, c, g, or t
  misc_feature (1269)..(1269): n is a, c, g, or t
  misc_feature (1282)..(1282): n is a, c, g, or t
  misc_feature (1286)..(1287): n is a, c, g, or t
  misc_feature (1289)..(1290): n is a, c, g, or t
  misc_feature (1295)..(1295): n is a, c, g, or t
  misc_feature (1297)..(1297): n is a, c, g, or t
tnaaagagaaattactatgagaggatcgcatcaccatcaccatcacgggatcctatttaggtgacactatagaatcgtcgacccacgcgtccgcccacgcgtccgctgttttctacgtctacggcagcttcgggatcttctggtacctgttctggctgctcgtctcctacgagtcccccgcgctgcaccccagcatctcggaggaggagcgcaagtacatcgaggacgccatcggagagagcgcgaaactcatgaaccccctcacgaagtttagcactccctggcggcgcttcttcacgtctatgccagtctatgccatcatcgtggccaacttctgccgcagctggacgttctacctgctgctcatctcccagcccgcctacttcgaagaagtgttcggcttcgagatcagcaaggtaggcctggtgtccgcgctgccccacctggtcatgaccatcatcgtgcccatcggcggccagatcgcggacttcctgcggagccgccgcatcatgtccaccaccaacgtgcgcaagttgatgaactgcggaggcttcggcatggaagccacgctgctgttggtggtcggctactcgcactccaagggcgtggccatctccttcctggtcctagccgtgggcttcagcggcttcgccatctctgggttcaacgtgaaccacctggacatagccccgcgctacgccagcatcctcatgggcatctccaacggcgtgggcacactgtcgggcatggtgtgccccatcatcgtggggggccatgactaagcacaanactcgggaggagtggcagtacgtgttcctaattgccttccctggtgcactatggaggtgtcatctttctacggggtctttgctnctggaaanaaaacaacccgtgggccaaancctgaggaaatgaacnaggaaaaatgtggcttccgttggccatgacaanctggntggaatggacaaagcaaaatggaagaatgangctnnancccccgggggaaaccccttgaacccccgccctcnntanggggccnaaaaaaanaaattttnanccccccaangnccccnccccnnntncgggaaaaatnnaacatgngncccncnaaggaaagggaantttccaagaanctcnnttccnctnatnctgggncggaagnaanagngttaaangaancccngnttcctttttnnnccngnccnnnggcctnaaaaaanaccnccccctttttcccnngggtggataaaanccntcttttctttcccnaatttccccccangggnnannaaaancng

SEQ ID NO: 663 - DNA, 1342 bp, Homo Sapiens
  misc_feature (709)..(709): n is a, c, g, or t
  misc_feature (714)..(714): n is a, c, g, or t
  misc_feature (717)..(717): n is a, c, g, or t
  misc_feature (783)..(783): n is a, c, g, or t
  misc_feature (795)..(795): n is a, c, g, or t
  misc_feature (812)..(812): n is a, c, g, or t
  misc_feature (877)..(877): n is a, c, g, or t
  misc_feature (881)..(881): n is a, c, g, or t
  misc_feature (887)..(887): n is a, c, g, or t
  misc_feature (941)..(941): n is a, c, g, or t
  misc_feature (946)..(946): n is a, c, g, or t
  misc_feature (953)..(953): n is a, c, g, or t
  misc_feature (957)..(957): n is a, c, g, or t
  misc_feature (979)..(979): n is a, c, g, or t
  misc_feature (990)..(990): n is a, c, g, or t
  misc_feature (993)..(993): n is a, c, g, or t
  misc_feature (1000)..(1000): n is a, c, g, or t
  misc_feature (1002)..(1002): n is a, c, g, or t
  misc_feature (1006)..(1006): n is a, c, g, or t
  misc_feature (1012)..(1012): n is a, c, g, or t
  misc_feature (1014)..(1014): n is a, c, g, or t
  misc_feature (1022)..(1022): n is a, c, g, or t
  misc_feature (1035)..(1037): n is a, c, g, or t
  misc_feature (1041)..(1041): n is a, c, g, or t
  misc_feature (1043)..(1044): n is a, c, g, or t
  misc_feature (1050)..(1050): n is a, c, g, or t
  misc_feature (1053)..(1054): n is a, c, g, or t
  misc_feature (1063)..(1063): n is a, c, g, or t
  misc_feature (1068)..(1068): n is a, c, g, or t
  misc_feature (1075)..(1076): n is a, c, g, or t
  misc_feature (1084)..(1125): n is a, c, g, or t
  misc_feature (1131)..(1131): n is a, c, g, or t
  misc_feature (1139)..(1139): n is a, c, g, or t
  misc_feature (1144)..(1147): n is a, c, g, or t
  misc_feature (1149)..(1149): n is a, c, g, or t
  misc_feature (1155)..(1156): n is a, c, g, or t
  misc_feature (1161)..(1161): n is a, c, g, or t
  misc_feature (1164)..(1167): n is a, c, g, or t
  misc_feature (1170)..(1170): n is a, c, g, or t
  misc_feature (1176)..(1176): n is a, c, g, or t
  misc_feature (1180)..(1183): n is a, c, g, or t
  misc_feature (1191)..(1192): n is a, c, g, or t
  misc_feature (1195)..(1196): n is a, c, g, or t
  misc_feature (1201)..(1201): n is a, c, g, or t
  misc_feature (1209)..(1210): n is a, c, g, or t
  misc_feature (1214)..(1214): n is a, c, g, or t
  misc_feature (1224)..(1228): n is a, c, g, or t
  misc_feature (1230)..(1231): n is a, c, g, or t
  misc_feature (1236)..(1236): n is a, c, g, or t
  misc_feature (1240)..(1240): n is a, c, g, or t
  misc_feature (1249)..(1249): n is a, c, g, or t
  misc_feature (1252)..(1252): n is a, c, g, or t
  misc_feature (1256)..(1258): n is a, c, g, or t
  misc_feature (1260)..(1264): n is a, c, g, or t
  misc_feature (1268)..(1268): n is a, c, g, or t
  misc_feature (1271)..(1271): n is a, c, g, or t
  misc_feature (1276)..(1288): n is a, c, g, or t
  misc_feature (1290)..(1290): n is a, c, g, or t
  misc_feature (1292)..(1292): n is a, c, g, or t
  misc_feature (1299)..(1301): n is a, c, g, or t
  misc_feature (1304)..(1305): n is a, c, g, or t
  misc_feature (1307)..(1308): n is a, c, g, or t
  misc_feature (1310)..(1315): n is a, c, g, or t
  misc_feature (1320)..(1321): n is a, c, g, or t
  misc_feature (1324)..(1327): n is a, c, g, or t
  misc_feature (1332)..(1332): n is a, c, g, or t
  misc_feature (1336)..(1339): n is a, c, g, or t
  misc_feature (1342)..(1342): n is a, c, g, or t
agaaattactatgagaggatcgcatcaccatcaccatcacggatcctatttaggtgacactatagaatcgtcgacccacgcgtccggccaccccctggcgagcggagccacacccagcgccttgcagtctaaggagagcccatgcctttggacatgctgttccttctgcctggaatttccttgtccgcctggtgaactcctcgttctgcaagactccgctcaaaacagcaccttcgagaagactgccctgccccttccctgccttgccccatgtccccctcccttgggtccccagagccacgcacatccagccctgcttcccacacacggggccgtgcgtgcctttcttcaccactgagctccttcaagggcagggactgtctttatctttgcatcccccgctgcaccctgtgcctgcccactgggcactcggtggatggtgtgcgggcggatgggtgagtgagcggacaaaggtgggtctgaggctggccctgtgtggtgtgaggtttggtggtcaggacctgggcgggtggtcctgagtgctggcccgtgtgcttgaaagggtgtggtgctattgggtcctactgtgttccccaggtcccgcagcccccggaagccaatagactccctcagggactctcggtccctcagctactcgcctgtggagcgtcgccgtccctcgccccagccctcaccacgggaccagcanagcancancagtgagcggggttcccggagaggccagcgtggggacagccgctcccccagccacaagcgcagganggagaaacctanccctcggcccatgaaanaccgctcctccaggtctccataaattgtctttggggggattccaccaacacccaatgctctgganccanaaggantgtcccttcttccccaacaaaaccgtgggaagggtccttgtctgctctcctttnaaacnttggcancccnttggaaggaagggctccctttnccctccccccnaantttttangntttnttaaangnattttggnttttttaaaaatnnngtanannaaaaanaanntttttttgntcaanaaaaatnnaaaatgcnnnnnnnnnnnnnnnnnnnnnnnnnnnnnnnnnnnnnnnnnngggggncccccccnaaagnnnncnaaaaannttaantannnnaanttggancccnnnnaaaaaccnnaannacccnaaaccccnnggantttttaaaannnnntnngcccngggnttttttttnggnaaannnannnnntggnaanttttnnnnnnnnnnnnnangnaaaaaannnggnnanncnnnnnnaaccnnggnnnnaaaantttnnnnttn

SEQ ID NO: 664 - DNA, 1287 bp, Homo Sapiens
  misc_feature (433)..(433): n is a, c, g, or t
  misc_feature (601)..(601): n is a, c, g, or t
  misc_feature (705)..(705): n is a, c, g, or t
  misc_feature (740)..(740): n is a, c, g, or t
  misc_feature (764)..(764): n is a, c, g, or t
  misc_feature (770)..(770): n is a, c, g, or t
  misc_feature (787)..(787): n is a, c, g, or t
  misc_feature (836)..(836): n is a, c, g, or t
  misc_feature (851)..(851): n is a, c, g, or t
  misc_feature (855)..(855): n is a, c, g, or t
  misc_feature (870)..(870): n is a, c, g, or t
  misc_feature (875)..(875): n is a, c, g, or t
  misc_feature (896)..(897): n is a, c, g, or t
  misc_feature (899)..(899): n is a, c, g, or t
  misc_feature (904)..(904): n is a, c, g, or t
  misc_feature (917)..(917): n is a, c, g, or t
  misc_feature (926)..(926): n is a, c, g, or t
  misc_feature (933)..(933): n is a, c, g, or t
  misc_feature (938)..(938): n is a, c, g, or t
  misc_feature (940)..(940): n is a, c, g, or t
  misc_feature (944)..(944): n is a, c, g, or t
  misc_feature (953)..(953): n is a, c, g, or t
  misc_feature (956)..(956): n is a, c, g, or t
  misc_feature (966)..(966): n is a, c, g, or t
  misc_feature (975)..(975): n is a, c, g, or t
  misc_feature (977)..(977): n is a, c, g, or t
  misc_feature (979)..(979): n is a, c, g, or t
  misc_feature (981)..(982): n is a, c, g, or t
  misc_feature (987)..(987): n is a, c, g, or t
  misc_feature (990)..(991): n is a, c, g, or t
  misc_feature (993)..(993): n is a, c, g, or t
  misc_feature (995)..(995): n is a, c, g, or t
  misc_feature (997)..(997): n is a, c, g, or t
  misc_feature (1000)..(1001): n is a, c, g, or t
  misc_feature (1004)..(1004): n is a, c, g, or t
  misc_feature (1006)..(1008): n is a, c, g, or t
  misc_feature (1011)..(1011): n is a, c, g, or t
  misc_feature (1013)..(1014): n is a, c, g, or t
  misc_feature (1016)..(1016): n is a, c, g, or t
  misc_feature (1020)..(1021): n is a, c, g, or t
  misc_feature (1028)..(1029): n is a, c, g, or t
  misc_feature (1032)..(1032): n is a, c, g, or t
  misc_feature (1038)..(1038): n is a, c, g, or t
  misc_feature (1043)..(1043): n is a, c, g, or t
  misc_feature (1052)..(1052): n is a, c, g, or t
  misc_feature (1056)..(1058): n is a, c, g, or t
  misc_feature (1062)..(1063): n is a, c, g, or t
  misc_feature (1082)..(1082): n is a, c, g, or t
  misc_feature (1086)..(1087): n is a, c, g, or t
  misc_feature (1091)..(1092): n is a, c, g, or t
  misc_feature (1097)..(1097): n is a, c, g, or t
  misc_feature (1099)..(1100): n is a, c, g, or t
  misc_feature (1107)..(1107): n is a, c, g, or t
  misc_feature (1110)..(1110): n is a, c, g, or t
  misc_feature (1112)..(1112): n is a, c, g, or t
  misc_feature (1120)..(1121): n is a, c, g, or t
  misc_feature (1127)..(1127): n is a, c, g, or t
  misc_feature (1133)..(1136): n is a, c, g, or t
  misc_feature (1139)..(1141): n is a, c, g, or t
  misc_feature (1149)..(1149): n is a, c, g, or t
  misc_feature (1152)..(1152): n is a, c, g, or t
  misc_feature (1163)..(1163): n is a, c, g, or t
  misc_feature (1166)..(1169): n is a, c, g, or t
  misc_feature (1174)..(1175): n is a, c, g, or t
  misc_feature (1183)..(1183): n is a, c, g, or t
  misc_feature (1186)..(1188): n is a, c, g, or t
  misc_feature (1191)..(1191): n is a, c, g, or t
  misc_feature (1195)..(1199): n is a, c, g, or t
  misc_feature (1202)..(1204): n is a, c, g, or t
  misc_feature (1213)..(1214): n is a, c, g, or t
  misc_feature (1216)..(1216): n is a, c, g, or t
  misc_feature (1219)..(1219): n is a, c, g, or t
  misc_feature (1221)..(1221): n is a, c, g, or t
  misc_feature (1225)..(1229): n is a, c, g, or t
  misc_feature (1232)..(1234): n is a, c, g, or t
  misc_feature (1236)..(1236): n is a, c, g, or t
  misc_feature (1239)..(1240): n is a, c, g, or t
  misc_feature (1242)..(1242): n is a, c, g, or t
  misc_feature (1244)..(1244): n is a, c, g, or t
  misc_feature (1253)..(1253): n is a, c, g, or t
  misc_feature (1255)..(1263): n is a, c, g, or t
  misc_feature (1265)..(1278): n is a, c, g, or t
  misc_feature (1282)..(1284): n is a, c, g, or t
  misc_feature (1286)..(1287): n is a, c, g, or t
agaaattactatgagaggatcgcatcaccatcaccatcacggatcctatttaggtgacactatagaatcgtcgacccacgcgtccgccggctggccagcaagggcacggagcctcaccccacaccggcctacccgccgggtccctacgctacacctccggggtacggggcggccttcagcgccgcacccgtaggggccctggccgccgcaggcgccaattacagccagatgcctgcagggtccttcatcacagccgccaccaacggccctccagtgcttgtgaagaaggagaaggaaatggtgggggcattggtgtcagacgggctggatcggaaggagccccgagccggggaggtgatctgtatagacgactgactggatcccaggcctgcccttcacccaggccccgtccccgaggccgacccccagctcnaagcgctggggcctgctgccagccctccaccttccccaccccttgggccatcactgggctaggaacccctttgcccctctctgcagctcctctcttcaagaagggccctttgtctttctccactcccacacacctttcccaccaagccttgaagactgtgctggtganaagaagtctgggtgggagatggctggcagggtcttccaagtaccttcctcccacactgccaagtatacacaacttcccagtaaatggttgtggggaggaaagangtggagcctccccagccgtttccctgcaaaatcanctctgtctcatgtggaaagtgganaatcanccttgcctggcctttangaacttttgtggggaaaaaagctttgaaaaaaggagggggactttaaanagggatgaaaatgancccntgggaaggaaggaanggacnaagaaggggtggctgcatgtnncntcccntacttctccccangtggagggnggaacanttttnanggangaaatcaantgntgttcacctnaaaaaaaangngncnnttcanggnntnantnacnnccngnnnacngnntnttgnnttggaannttncccccntcccnaggaacaangaannncccnnaaaaaaaaaaaaaagggtngggnnaaannccccnanncaaaaanaantncccaaccnnttttanggaccnnnnaannnaaaagggnggnaaaaaaaaaanggnnnnaaatnnggggaaanccnnnttngggnnnnnttnnngaaaaattnnanaancncccnnnnnggnnngnaannananaattttttnannnnnnnnngnnnnnnnnnnnnnntttnnnann

SEQ ID NO: 665 - DNA, 255 bp, Homo Sapiens
gaatcgtcgacccacgcgtccgcaagctttcgaagacacatgatggcacacactggagatggccctcataaatgcacagtatgtgggaaagcctttgattctcctagtgtatttcaaagacatgaaaggactcacactggagagaaaccctatgaatgcaagcaatgtgggaaagccttccgtacttccagttcccttcgaaaacatgaaacaacacacactggagagcaaccctataaatgtaaatgtggaaaa

SEQ ID NO: 666 - DNA, 255 bp, Homo Sapiens
gaatcgtcgacccacgcgtccggaaaactacccctaaaagccaaaatgggaaaggaaaagactcatatcaacattgtcgtcattggacacgtagattcgggcaagtccaccactactggccatctgatctataaatgcggtggcatcgacaaaagaaccattgaaaaatttgagaaggaggctgctgagatgggaaagggctccttcaagtatgcctgggtcttggataaactgaaagctgagcgtgaacgtggt

SEQ ID NO: 667 - DNA, 255 bp, Homo Sapiens
gaatcgtcgacccacgcgtccgccatccgggatgctaacctgtacgtcagcgggctccccaagaccatgagccagaaagagatggagcagctcttctcccagtacggccgcatcatcacgtcccgcatcctggtggaccaggtcacaggtgtctctcggggtgtgggattcatccgctttgacaagaggattgaggccgaagaggctatcaaaggactgaatgggcagaagccgctgggcgcagctgagcccatc

SEQ ID NO: 668 - DNA, 255 bp, Homo Sapiens
gaatcgtcgacccacgcgtccggctctcagctggctcttgtctcgcccttttgttttatttcggaggcttgcagtttagggcatcgaggagccacagccggagagaagaacacagcggtaggaatggcttgcaccaccccagtccggatcatttctggccccgcttcccggacgctctgcgccccttcgttccttgggatcaattggaaaacgaggattccagcgtgcacatttccccccggcagaagcgagatg

SEQ ID NO: 669 - DNA, 255 bp, Homo Sapiens
gaatcgtcgacccacgcgttccgcccacgcgtccgcccacgcgtccgcccacgcgatccgcccacgcgtccggcaccatggcggttggcaagaacaagcgccttacgaaaggcggcaaaaagggagccaagaagaaagtggttgatccattttctaagaaagattggtatgatgtgaaagcacctgctatgttcaatataagaaatattggaaagacgctcgtcaccaggacccaaggaaccaaaattgcatctg

SEQ ID NO: 670 - DNA, 255 bp, Homo Sapiens
gaatcgtcgacccacgcgtccggacgaggggaggagccgctggctcccagccccgccgcgatgagcctcggccgcctttgccgcctactgaagccggcgctgctctgtggggctctggccgcgcctggcctggccgggaccatgtgcgcgtcccgggacgactggcgctgtgcgcgctccatgcacgagttttccgccaaggacatcgacgggcacatggttaacctggacaagtaccggggcttcgtgtgcatc

SEQ ID NO: 671 - DNA, 255 bp, Homo Sapiens
gaatcgtcgacccacgcgtccgctgccaacatggtgttcaggcgcttcgtggaggttggccgggtggcctatgtctcctttggacctcatgccggaaaattggtcgcgattgtagatgttattgatcagaacagggctttggtcgatggaccttgcactcaagtgaggagacaggccatgcctttcaagtgcatgcagctcactgatttcatcctcaagtttccgcacagtgcccaccagaagtatgtccgacaa

SEQ ID NO: 672 - DNA, 255 bp, Homo Sapiens
gaatcgtcgacccacgcgtccgttcctgcctctgccagaacggagggacctgtgaccctgtctcaggccactgtgcgtgcccagagggctgggccggcctggcctgtgagaaggagtgcctcccccgggacgtcagagctggctgccggcacagcggcggttgcctcaacgggggcctgtgtgacccgcacacgggccgctgcctctgcccagccggctggactggggacaagtgtcagagcccctgcctgcggg

SEQ ID NO: 673 - DNA, 255 bp, Homo Sapiens
gaatcgtcgacccacgcgtccggctgcacgcgccgtggctccggatctcttcgtctttgcagcgtagcccgagtcggtcagcgccggaggacctcagcagccatgtcgaagccccatagtgaagccgggactgccttcattcagacccagcagctgcacgcagccatggctgacacattcctggagcacatgtgccgcctggacattgattcaccacccatcacagcccggaacactggcatcatctgtaccatt

SEQ ID NO: 674 - DNA, 255 bp, Homo Sapiens
gaatcgtcgacccacgcgtccggccgaagcggctgcatctggcgccgcgtctgccccgcgtgctcggagcggattctgcccgccgtccccggagccctcggcgccccgctgagcccgcgatcacttcctccctgtgaccaaccggcgctgcaggttagagcctggcaatgccgtttgggtgtgtgactctgggcgacaagaagaactataaccagccatcggaggtgactgacagatatgatttgggacaggtca

SEQ ID NO: 675 - DNA, 255 bp, Homo Sapiens
gaatcgtcgacccacgcgtccgcaaaacaccaaatggcggatgacgccggtgcagcgggggggcccgggggccctggtggccctgggatggggaaccgcggtggcttccgcggaggtttcggcagtggcatccggggccggggtcgcggccgtggacggggccggggccgaggccgcggagctcgcggaggcaaggccgaggataaggagtggatgcccgtcaccaagttgggccgcttggtcaaggacatgaag

SEQ ID NO: 676 - DNA, 255 bp, Homo Sapiens
gaatcgtcgacccacgcgtccgcttcagcagcaagagcagcagctccagcaactccagcagctcctggcctccccgcagctgaccccggaacaccagactgttgtctaccagatgatccagcagatccagcagaaacgggagctgcagcgcctgcagatggctgggggctcccagctgcccatggccagcctgctggcaggaagctccaccccgctgctgtctgcgggtacccctggcctgctgcccacagcgtc

SEQ ID NO: 677 - DNA, 255 bp, Homo Sapiens
gaatcgtcgacccacgcgtccgcccacgcgtccgggaagatggcggacgaggagaagctgccgcccggctgggagaagcgcatgagccgcagctcaggccgagtgtactacttcaaccacatcactaacgccagccagtgggagcggcccagcggcaacagcagcagtggtggcaaaaacgggcagggggagcctgccagggtccgctgctcgcacctgctggtgaagcacagccagtcacggcggccctcgtcc

SEQ ID NO: 678 - DNA, 255 bp, Homo Sapiens
gaatcgtcgacccacgcgtccggggggaatttgtcctgtaaaatagacttccagagctcttttgccccctctgctcccatgcaccctccccttccaagtcctttagcaaggcctggatgtttagggagaaagtggtccaaggctgctgacaagagggaccaaagggggtgctgggttcccagggagcagggatgtttaattactatgtcatgtgcaatgttgttttaggccaacccttgccccaagcccagtctc

SEQ ID NO: 679 - DNA, 255 bp, Homo Sapiens
gaatcgtcgacccacgcgtccgcaaaaaagccgttcaatagtattattgagcatctgtcagtggtattcccatgttacaacagcactgagcttgctggttttattaaaaaagtgcgaagcaaaaacaagaactcactctcaggattgagtattgatgaaattgtccaaagagtgacagaacacattctagatgaacagaaaaagaaaaagccaaacccaggaaaggacaagaggacttatgagcccagctctgcc

SEQ ID NO: 680 - DNA, 255 bp, Homo Sapiens
gaatcgtcgacccacgcgtccgatccttgggccgctgggcaagcggcgagacctggccagggccagcgagccgaggacagagggcgcacggagggccgggccgcagccccggccgcttgcagaccccgccatggacccgttcctggtgctgctgcactcggtgtcgtccagcctgtcgagcagcgagctgaccgagctcaagttcctatgcctcgggcgcgtgggcaagcgcaagctggagcgcgtgcagagcgg

SEQ ID NO: 681 - DNA, 255 bp, Homo Sapiens
gaatcgtcgacccacgcgtccgtgaaagccacagatcaggaaaagagcagaaaactacatgaacttacggttatgcaagatagacgagaacaagcaagacaagacttgaagggtttggaagagacagtggcaaaagaacttcagactttacacaacctgcgcaaactctttgttcaggacctggctacaagagttaaaaagagtgctgagattgattctgatgacaccggaggcagcgctgctcagaagcaaaaa

SEQ ID NO: 682 - DNA, 255 bp, Homo Sapiens
gaatcgtcgacccacgcgtccgcccacgcgtccggccggccgggtcccctcgggtgctatgaagatgccgaccatggtgcccctgagcctcctgagcgtgccccagctgagcggagccggcgggggagggggagaggcgggtgccggcggcggcgctgccgcagtggccgccggtggcgtggtgaccacgaccgcctcggggaagcgcatccggaagaaccatgcctgcgagatgtgtggcaaggccttccgcga

SEQ ID NO: 683 - DNA, 255 bp, Homo Sapiens
  misc_feature (246)..(246): n is a, c, g, or t
gaatcgtcgacccacgcgtccgcccacgcgtccgctggaaggaaggctgaggcctggtcagcagtgaccccagcagagcaggccccagtcctcctgggaggctggccccccttttttctgggccctactgccctcctctgcccaggaaatgggggggtttcagcaactcagtgtcacagaataaaatcaagtgtggagtgccaaaaaaaaaaaaaaaaaaaaaaaaaaagggcggccgctccctanagtgagtcg

SEQ ID NO: 684 - DNA, 255 bp, Homo Sapiens
gaatcgtcgacccacgcgtccggcaactggccccacaactcctgtcattgtaagttattctgccaccacctaacaggacggagtggagtgagtttggataaacggaccgagctgggcttctcttcctccctacagaggggagatctcagcactttgtccggagctgaggaagtggtttctgtgttttacagtttttccagccattcttttcttccccctcctgaagcaagcaaagagcgtggaggcgtgtgcagg

SEQ ID NO: 685 - DNA, 255 bp, Homo Sapiens
gaatcgtcgacccacgcgtccgcccacgcgtccgcccacgcgtccgcggacgcgtgggctgcccctgtcccgtttgactttacacataaaaaacaatcaggtggtgcaggccagtatggaaaagtaataggtgtcctggagcctctggacccagaggactacactaaattggaattttcagatgaaacattcggatcaaatattccaaagcagtttgtgcctgctgtagaaaaggggtttttagatgcctgcgag

SEQ ID NO: 686 - DNA, 255 bp, Homo Sapiens
  misc_feature (152)..(152): n is a, c, g, or t
  misc_feature (194)..(194): n is a, c, g, or t
  misc_feature (210)..(210): n is a, c, g, or t
  misc_feature (232)..(232): n is a, c, g, or t
  misc_feature (237)..(237): n is a, c, g, or t
  misc_feature (241)..(241): n is a, c, g, or t
gaatcgtcgacccacgcgctccgcaggcgccgccgggacgggcacgggcgcgcgggctccggcgggcgccggctgccttcctccgtcgctcgctgtctctcccggccgcattctcctccgctgcggggccgagctctccccagcgctcgcangaaggaagaagggagccgaggacgccgagaagttcccgcggnagccgcggatcccggncaaggcggaggctgcggctccnacggngcangagcgcgatccacg

SEQ ID NO: 687 - DNA, 255 bp, Homo Sapiens
  misc_feature (57)..(57): n is a, c, g, or t
  misc_feature (87)..(87): n is a, c, g, or t
  misc_feature (94)..(94): n is a, c, g, or t
  misc_feature (115)..(115): n is a, c, g, or t
  misc_feature (124)..(124): n is a, c, g, or t
  misc_feature (140)..(140): n is a, c, g, or t
  misc_feature (163)..(163): n is a, c, g, or t
  misc_feature (190)..(190): n is a, c, g, or t
  misc_feature (199)..(199): n is a, c, g, or t
  misc_feature (224)..(224): n is a, c, g, or t
  misc_feature (247)..(247): n is a, c, g, or t
gaatcgtcgacccacgcggtccggcgccccctacgggctacatgtccgggtaccccncgatgtacccggcgcctcagtaccaagggnacttccngctcttccgcgggctccaggnacccgcgcncggtcccgccacgtcnccctccttcctgagttgtttggnacccgggacggtgggcactggactcgnggggactgnagaggatccaggtgtgatagccganaccgcgccatccaagcgaggccnacattcgt

SEQ ID NO: 688 - DNA, 255 bp, Homo Sapiens
gaatcgtcgacccacgcgtccgcggacgcgtgggcgcagctgtaccactcgccagcgcgacggttcggaggccccgttcaccaccaggcgcagagattcaggttctcccccatgggcgtcgatcacatgagcgggctctctggcgtcaacgtgccaggaaacgcctcctccggctggtgcattttcatctacaacctggggcaggatgccgacgaggggatcctctggcagatgtttgggccgtttggtgccgtc

SEQ ID NO: 689 - DNA, 255 bp, Homo Sapiens
gaatcgtcgacccacgcgtccgagcgaggacgtggtgggtcctctggtgcgaaattccggatttccttgggtcttccggtaggagctgtaatcaattgtgctgacaacacaggagccaaaaacctgtatatcatctccgtgaaggggatcaagggacggctgaacagacttcccgctgctggtgtgggtgacatggtgatggccacagtcaagaaaggcaaaccagagctcagaaaaaaggtacatccagcagtg

SEQ ID NO: 690 - DNA, 255 bp, Homo Sapiens
  misc_feature (124)..(125): n is a, c, g, or t
  misc_feature (142)..(142): n is a, c, g, or t
  misc_feature (159)..(160): n is a, c, g, or t
  misc_feature (164)..(164): n is a, c, g, or t
  misc_feature (167)..(167): n is a, c, g, or t
  misc_feature (171)..(171): n is a, c, g, or t
  misc_feature (176)..(176): n is a, c, g, or t
  misc_feature (189)..(189): n is a, c, g, or t
  misc_feature (191)..(191): n is a, c, g, or t
  misc_feature (193)..(193): n is a, c, g, or t
  misc_feature (205)..(206): n is a, c, g, or t
  misc_feature (208)..(208): n is a, c, g, or t
  misc_feature (211)..(213): n is a, c, g, or t
  misc_feature (216)..(216): n is a, c, g, or t
  misc_feature (224)..(224): n is a, c, g, or t
  misc_feature (226)..(226): n is a, c, g, or t
  misc_feature (233)..(233): n is a, c, g, or t
  misc_feature (237)..(237): n is a, c, g, or t
  misc_feature (239)..(240): n is a, c, g, or t
  misc_feature (242)..(242): n is a, c, g, or t
  misc_feature (244)..(245): n is a, c, g, or t
  misc_feature (247)..(248): n is a, c, g, or t
gaatcgtcgacccacgcgtccgggcttggcggttggagcggctgtcgccatgttgtcggtagcagcccgctcgggcccgttcgcgcccgtcctgtcggccacgtcccgcggggtggcggacgcnntgcggaccttggtgcangccacggtgcccacaannccgnagnaagntgtgntgagatctgaaananancttcctcaacgnnantcnnnaancgacaagncnatgcacnaacntnngnanngnnagaagaa

SEQ ID NO: 691 - DNA, 255 bp, Homo Sapiens
gaatcgtcgacccacgcgtccgcctcgacaacctatcgaaggcgccatggagcgaccggcgcccctggccgtgcttcccttctcggaccccgcgcacgccctgagcctgctgcgcggcctgagccagctgcgcgccgagcgcaagttcctggacgtgaccctggaggcggcgggcgggcgcgacttcccggcgcaccgtgcggtgctggccgccgccagcccctacttccgcgccatgttcgcggggcagctgcg

SEQ ID NO: 692 - DNA, 255 bp, Homo Sapiens
gaatcgtcgacccacgcgtccgaaaaaaccaaccaaaccaagaggcatccaaccaagtccaagtcccgcgtcccggccacacgcccgcaccgagggagcacgccggcaggggcgccgaggagcggccccaggacaggacggccccaccgcgtcctggctggcagcacagtgggaacacgcccctccgtctcaggcagtgggggagttggaggggaaggggcctcccttgtgggacccgtggggggctctgttttc

SEQ ID NO: 693 - DNA, 255 bp, Homo Sapiens
gaatcgtcgacccacgcgtccgggtacctgctctgcgaactggtgtctgacgacccccgctgccgcctaagcctcgatgaccgagttctgagcagcctcgtacgggacacgatcgccagggtgcacggaactttcggcgcagccgcctgctccatcggcttcgcgggtgcaagggcgctgggggaagaggggaacccgggaggatggcgggatgtggagggggcaggcgccggaggaagaaagaaggggcacgag

SEQ ID NO: 694 - DNA, 255 bp, Homo Sapiens
gaatcgtcgacccacgcgtccggggccgggcggtttggccccttagcgcccgggcgtcggggcggtaaaaggccggcagaagggaggcacttgagaaatgtctttcctccaggacccaagtttcttcaccatggggatgtggtccattggtgcaggagccctgggggctgctgccttggcattgctgcttgccaacacagacgtgtttctgtccaagccccagaaagcggccctggagtacctggaggatataga

SEQ ID NO: 695 - DNA, 255 bp, Homo Sapiens
gaatcgtcgacccacgcgtccggggagtcgggccgcgactgtggtcgtttttataccttcccgcgcggacgccggcgctgccaacggaagggcggagacggagtttcgtcatgttggccaggcccatttgagatctttgaagatatcctcaacgtgaggctctgctgccatgaaggtgaagattaagtgctggaacggcgtggccacttggctctgggtggccaacgatgagaactgtggcatctgcaggatggc

SEQ ID NO: 696 - DNA, 255 bp, Homo Sapiens
gaatcgtcgacccacgcgtccggttgtgttgtgccaatggtggagaagaaaacttcggttcgctcccaggaccccgggcagcggcgggtgctggaccgggctgcccggcagcgtcgcatcaaccggcagctggaggccctggagaatgacaacttccaggatgacccccacgcgggactccctcagctcggcaagagactgcctcagtttgatgacgatgcggacactggaaagaaaaagaagaaaacccgaggt

SEQ ID NO: 697 - DNA, 255 bp, Homo Sapiens
  misc_feature (143)..(143): n is a, c, g, or t
  misc_feature (158)..(158): n is a, c, g, or t
  misc_feature (161)..(161): n is a, c, g, or t
gaatcgtcgacccacgcgtccggccgctgccaccgcaccccgccatggagcggccgtcgctgcgcgccctgctcctcggcgccgctgggctgctgctcctgctcctgcccctctcctcttcctcctcttcggacacctgcggnccctgcgagccggcntcntgcccgcccctgcccccgctgggctgcctgctgggcgagacccgcgacgcgtgcggttgctgccctatgtgcgcccgcggcgagggcgagccgt

SEQ ID NO: 698 - DNA, 255 bp, Homo Sapiens
gaatcgtcgacccacgcgtccgcacgtgttcggcctgtgtgccacagccctggtgacggacgtgatccagctggccacgggttaccacactcccttcttcctcaccgtctgcaagcccaactacactctcctgggcacgtcctgcgaggtcaacccctacatcacgcaggacatctgctccggccacgacatccacgccatcctgtctgcacggaagaccttcccgtcccagcacgccacgctgtcagccttcgc

SEQ ID NO: 699 - DNA, 255 bp, Homo Sapiens
gaatcgtcgacccacgcgtccgcccacgcgtccgatcggtttaagaagcggacggagctgttcattgccgccgagggcattcacacgggccagtttgtgtattgcggcaagaaggcccagctcaacattggcaatgtgctccctgtgggcaccatgcctgagggtacaatcgtgtgctgcctggaggagaagcctggagaccgtggcaagctggcccgggcatcagggaactatgccaccgttatctcccacaac

SEQ ID NO: 700 - DNA, 255 bp, Homo Sapiens
gaatcgtcgacccacgcgtccggcacaacccatggctgcgctgggctgcgcgaggctgaggtgggcgctgcgaggggccggccgtggcctctgcccccacggggccagagccaaggccgcgatccctgccgccctcccctcggacaaggccaccggagctcccggagccgggcctggtgtccggcggcggcaacggagcttagaggagattccacgtctaggacagctgcgcttcttctttcagctgttcgttca

SEQ ID NO: 701 - DNA, 255 bp, Homo Sapiens
gaatcgtcgacccacgcgtccgcccacgcgtccgccctcatccacgatggcctagcacgtggaattcgcgaagctgccaaagccttagacaagcgccaagcccatctttgtgtgcttgcatccaactgtgatgagcctatgtatgtcaagttggtggaggccctttgtgctgaacaccaaatcaacctaattaaggttgatgacaacaagaaactaggagaatgggtaggcctttgtaaaattgacagagagggg

SEQ ID NO: 702 - DNA, 255 bp, Homo Sapiens
gaatcgtcgacccacgcgtccgcaaaaaacaacaacaacaaaacaaaaaccaaaaaggaaaatgtagcatgttggctaaaactggagcaaagtgcactaaaacaatttcctgaactcacctgttgtactattcaccttttaaaccataaattgctctttagccatttgtagtgcagtaaatgttacaggaaaagacttggcacattttcttccaaattttaagaggtgattttcaaaagctttattggggtatgt

SEQ ID NO: 703 - DNA, 255 bp, Homo Sapiens
gaatcgtcgacccacgcgtccgctgaccaggagagactggcaacctgcaccccttctgacagaacccactgtgctgccacaccctccagtagtgaggatactgaaaccgtatcaaacagcagtgagggacgggcctcccctcacgatgtcttggagaccatctttgtccgaaaagtgggggcttttgtcaacaaacccattaaccaggtgaccctgacgagtttggatataccctttgccatgtttgctcccaag

SEQ ID NO: 704 - DNA, 255 bp, Homo Sapiens
  misc_feature (229)..(229): n is a, c, g, or t
gaatcgtcgacccacgcgtccgggcgccgccgggacgggcacgggcgcgcgggctccggcgggcgccggctgccttcctccgtcgctcgctgtctctcccggccgcattctcctccgctgcggggccgagctctccccagcgctcgcaggaaggaagaagggagccgaggacgccgagaagttcccgcggcagccgcggatcccggccaaggcggaggctgcggctccnacggggcaggagcgcgatccacggcg

SEQ ID NO: 705 - DNA, 255 bp, Homo Sapiens
  misc_feature (31)..(32): n is a, c, g, or t
gaatcgtcgacccacgcgtccgcccacgcgnnggctttccgcgccgccacaatggtgcgcatgaatgtcctggcagatgctctcaagagtatcaacaatgccgaaaagagaggcaaacgccaggtgcttattaggccgtgctccaaagtcatcgtccggtttctcactgtgatgatgaagcatggttacattggcgaatttgaaatcattgatgaccacagagctgggaaaattgttgtgaacctcacaggcagg

SEQ ID NO: 706 - DNA, 255 bp, Homo Sapiens
gaatcgtcgacccacgcgtccgcgctccagctctctgctctcccagcgcagcgccgccgcccggcccctccagcttcccggaccatggccaacctggagcgcaccttcatcgccatcaagccggacggcgtgcagcgcggcctggtgggcgagatcatcaagcgcttcgagcagaagggattccgcctcgtggccatgaagttcctccgggcctctgaagaacacctgaagcagcactacattgacctgaaagac

SEQ ID NO: 707 - DNA, 255 bp, Homo Sapiens
gaatcgtcgacccacgcgtccgtgatcgccgccatcatgggtcgcatgcatgctcccgggaagggcctgtcccagtcggctttaccctatcgacgcagcgtccccacttggttgaagttgacatctgacgacgtgaaggagcagatttacaaactggccaagaagggccttactccttcacagatcggtgtaatcctgagagattcacatggtgttgcacaagtacgttttgtgacaggcaataaaattttaaga

SEQ ID NO: 708 - DNA, 255 bp, Homo Sapiens
gaatcgtcgacccacgcgtccggtgccactgaagatcctggtgtcgccatgggccgccgccccgcccgttgttaccggtattgtaagaacaagccgtacccaaagtctcgcttctgccgaggtgtccctgatgccaagattcgcatttttgacctggggcggaaaaaggcaaaagtggatgagtttccgctttgtggccacatggtgtcagatgaatatgagcagctgtcctctgaagccctggaggctgcccga

SEQ ID NO: 709 - DNA, 255 bp, Homo Sapiens
gaatcgtcgacccacgcgtccggagggtggggggtgtgggaagggtaccacagatcaggccggggcagctgtaggggcgggggcccagacagccaggccgccaccagagcagccccatggggtgccccagacgcgggcctccaagaagccaagtcccagtctgttttctggcatcagacaccggcccgtgttccttgtcagacagacagactctcaggcctgcctggggagtcgtgtccctcagctgcagggcac

SEQ ID NO: 710 - DNA, 255 bp, Homo Sapiens
gaatcgtcgacccacgcgtccgcccacgcgtccggggacaacggccacctgtaccgggaggaccagacctcccccgcgccgggcctccgctgcctcaactggctggacgcgcagagcgggctggcctcggcccccgtgtcgggggccggcaatcacagttactgccgaaacccggacgaggacccgcgcgggccctggtgctacgtcagtggcgaggccggcgtccctgagaaacggccttgcgaggacctgcgc

SEQ ID NO: 711 - DNA, 255 bp, Homo Sapiens
gaatcgtcgacccacgcgtccgcgagcgccttcccggtgaccccgcagtgggtgtgtgaggggaggacggacagacccagacgccgccggaccaggaggacgctgacgaggcaccatgcgtgagatcgtgcacatccaggcgggccagtgcggcaaccagatcggcgccaagttttgggaggtcatcagtgatgagcatgggattgaccccactggcagttaccatggagacagtgatttgcagctggagagaat

SEQ ID NO: 712 - DNA, 255 bp, Homo Sapiens
gaatcgtcgacccacgcgtccgaccaagcgctccaggggctttgggtttgtcacatatgccactgtggaggaggtggatgcagctatgaatgcaaggccacacaaggtggatggaagagttgtggaaccaaagagagctgtctccagagaagattctcaaagaccaggtgcccacttaactgtgaaaaagatatttgttggtggcattaaagaagacactgaagaacatcacctaagagattattttgaacagta

SEQ ID NO: 713 - DNA, 255 bp, Homo Sapiens
gaatcgtcgacccacgcgtccgggggacgctgcggggggacccgtgctgaggcggcggcggcgacgtgggctgcggcgggcccgcggcgtcgggcggtgcggatgtcgggctgggcggacgagcgcggcggcgagggcgacgggcgcatctacgtggggaaccttccgaccgacgtgcgcgagaaggacttggaggacctgttctacaagtacggccgcatccgcgagatcgagctcaagaaccggcacggcctc

SEQ ID NO: 714 - DNA, 255 bp, Homo Sapiens
gaatcgtcgacccacgcgtccgcccacgcgtccgcgctgacgggcacgctgactggaggctggcggacaggcgacagcgacctgcggcaggaccagaggagcgagagcagcaagaaccacacccagcagcaatgtcagcggaagtggaaacctcagagggggtagacgagtcagaaaaaaagaactctggggccctagaaaaggagaaccaaatgagaatggctgacctctcggagctcctgaaggaagggacca

SEQ ID NO: 715 - DNA, 173 bp, Homo Sapiens
  misc_feature (172)..(173): n is a, c, g, or t
gaatcgtcgacccacgcgtccgcccacgcgatccgcccacgcgtccgcccacgcgtccgatgaccccactgtttgtccccgtgatcagcgcgagcggctcccgtatctcctccgtcccctcctgccgcgcggcgtgagcgccgggctcggggcccccccggccgcccgcccnn

SEQ ID NO: 716 - DNA, 255 bp, Homo Sapiens
gaatcgtcgacccacgcgtccgccttcaggagccctgagcccaacatccatgagacaccccgagttgtgcttcatgagagttggattctctgcccactctttcagggatgtccaaggtccatgttagggggcaggcccccagctccactcactgcacaagcaccctaaatgttggaagcacaaaatggttgtgatttgagcacaatggcagggtcccgcaggcagacttgacaggcccaggcccgggaggatccc

SEQ ID NO: 717 - DNA, 255 bp, Homo Sapiens
gaatcgtcgacccacgcgtccgatcaagaggaggctgtgtcctcagttaccctggaaggatgtgtgtgttggagccacacggttggacaggttcccagccctaggtttgggccgcagggcccctggggccaaggaagaagacagccccaagtgggtgtccggggagagcctggcctgccaccagcttatgtgatcttgggcaagtccctgccctccctggaacgaagggccagggggctggactttcccacacaa

SEQ ID NO: 718 - DNA, 255 bp, Homo Sapiens
  misc_feature (120)..(120): n is a, c, g, or t
  misc_feature (129)..(129): n is a, c, g, or t
  misc_feature (142)..(142): n is a, c, g, or t
  misc_feature (155)..(155): n is a, c, g, or t
  misc_feature (167)..(167): n is a, c, g, or t
  misc_feature (169)..(169): n is a, c, g, or t
  misc_feature (172)..(172): n is a, c, g, or t
  misc_feature (176)..(176): n is a, c, g, or t
  misc_feature (179)..(180): n is a, c, g, or t
  misc_feature (188)..(188): n is a, c, g, or t
  misc_feature (192)..(192): n is a, c, g, or t
  misc_feature (197)..(197): n is a, c, g, or t
  misc_feature (204)..(204): n is a, c, g, or t
  misc_feature (211)..(211): n is a, c, g, or t
  misc_feature (223)..(223): n is a, c, g, or t
  misc_feature (227)..(227): n is a, c, g, or t
  misc_feature (230)..(230): n is a, c, g, or t
  misc_feature (234)..(234): n is a, c, g, or t
  misc_feature (240)..(240): n is a, c, g, or t
  misc_feature (242)..(242): n is a, c, g, or t
  misc_feature (244)..(246): n is a, c, g, or t
  misc_feature (249)..(249): n is a, c, g, or t
  misc_feature (251)..(252): n is a, c, g, or t
gaatcgtcgacccacgcgtccgggcttggcggttggagcggctgtcgccatgttgtcggtagcagcccgctcgggcccgttcgcgcccgtcctgtcggccacgtcccgcggggtggcggncgcgctgcngcccttggtgcangccacggtgcccncaacccgggagnangangttntgnnaatgaatnggcncgtcngcaagcngaaatanctaaacaactangagnaanccgnaacttngnannnccngnnaaa

SEQ ID NO: 719 - DNA, 255 bp, Homo Sapiens
gaatcgtcgacccacgcgtccggagcagtgtccggccatggccggagcccgcaggctggagctaggcgaggccctggcgctggggtcgggctggcgtcatgcgtgccacgctctcctctacgcgccggaccctgggatgctcttcggccgcatcccgctgcgctacgccatactgatgcagatgcgcttcgatggacgcctgggcttccccggcggattcgtggacacgcaggacagaagcctagaggacgggct

SEQ ID NO: 720 - DNA, 255 bp, Homo Sapiens
gaatcgtcgacccacgcgtccgccgacatggaagtcatcgagctgaacaaatgcacctcgggccaatcctttgaagtcatcctgaagccaccctcctttgatggggttcccgagttcaacgcctccctgccaaggcggcgagacccatccctggaagagatccagaagaaactagaagcggctgaggagcgaaggaagtaccaggaagcggagctcctgaaacacctagcagagaaacgggaacatgagagagag

SEQ ID NO: 721 - DNA, 255 bp, Homo Sapiens
gaatcgtcgacccacgcgtccgagaagactcgccgaaagttcctggacctgggggtcaccctgcgccgagcatccacgggcaagagccggaaggagaaaggcagcaaccgactgtccatgggcagcagggagtcagtggaggggtccggcaggtcagggggctccccgttcctgcctttttcctggttcacggacagcggcaagggctcagcatcctcgggtagcaccacctcccccacctgctcccctaaacac

SEQ ID NO: 722 - DNA, 255 bp, Homo Sapiens
gaatcgtcgacccacgcgtccgcccacgcgtccggtcaaggccaggcacggcggctcacgcctgtaatcccagcactttgggaggccgagacaggcggatcacctgaggtcgggagttcgagaccagccttaccaacatggagaaaccccatctctactaaaaatacaaaattacctgggcgtggtggtgcatgcctgtaatcccatcatctactcaggaggctgaggcaggagaattgcttgaacccaggaggc

SEQ ID NO: 723 - DNA, 255 bp, Homo Sapiens
gaatcgtcgacccacgcgtccgccgcgctcgcagctcgcaggcgccgcgtagccgtcgccaccgccgccagcccgtgcgccctcggcgcgtacccgccgcgctcccatccccgccgccggccaggggcgcgctcggccgccccggacagtgtcccgctgcggctccgcggcgatggccaccaagatcgacaaagaggcttgccgggcggcgtacaacctggtgcgcgacgacggctcggccgtcatctgggtgac

SEQ ID NO: 724 - DNA, 255 bp, Homo Sapiens
gaatcgtcgacccacgcgtccggcatggcgtacccggggcatcctggcgccggcggcgggtactacccaggcgggtatggaggggctcccggagggcctgcgtttcccggacaaactcaggatccgctgtatggttactttgctgctgtagctggacaggatgggcagatagatgctgatgaattgcagagatgtctgacacagtctggcattgctggaggatacaaaccttttaacctggagacttgccggctt

SEQ ID NO: 725 - DNA, 255 bp, Homo Sapiens
gaatcgtcgacccacgcgtccgcctgcctactgcagcgtaggcctcgcctcaacggcaggagagcaggcggctgcggttgctgcagccttcagtctccacccggactacgccatgttggggtttgtgggtcgggtggccgctgctccggcctccggggccttgcggagactcaccccttcagcgtcgctgcccccagctcagctcttactgcgggccgctccgacggcggtccatcctgtcagggactatgcggc

SEQ ID NO: 726 - DNA, 255 bp, Homo Sapiens
  misc_feature (19)..(19): n is a, c, g, or t
gaatcgtcgacccacgcgntccggccatggccgcgccggccccgggcctcatctcggtgttctcgagttcccaggagctgggtgcggcgctagcgcagctggtggcccagcgcgcagcatgctgcctggcaggggcccgcgcccgtttcgcgctcggcttgtcgggcgggagcctcgtctcgatgctagcccgcgagctacccgccgccgtcgcccctgccgggccagctagcttagcgcgctggacgctgggct

SEQ ID NO: 727 - DNA, 255 bp, Homo Sapiens
  misc_feature (13)..(13): n is a, c, g, or t
  misc_feature (27)..(27): n is a, c, g, or t
  misc_feature (43)..(43): n is a, c, g, or t
  misc_feature (53)..(53): n is a, c, g, or t
  misc_feature (71)..(71): n is a, c, g, or t
  misc_feature (73)..(73): n is a, c, g, or t
  misc_feature (203)..(203): n is a, c, g, or t
  misc_feature (209)..(209): n is a, c, g, or t
gaatcgtccaccnacgcgttccggggnacttgaaaagaagtcngctgttgcanataaacatgaattgctcngncttgccagcagcaatcatttggggaagaatctacagttgctgatggacagagtggatgaaatgagccagatatagttaaatacaacacatacgtgaggaatactagtaaacaacagcagccgaaacatcngtatcngcagcgtcgccagcaggagaatatgcagcgcctgagccgaggagaa

SEQ ID NO: 728 - DNA, 255 bp, Homo Sapiens
gaatcgtcgacccacgcgatccgcccacgcgtccggtcggcagccgcgctcgagcctccgcccgcaccgagccgcgggacccgggccgtaccggggaggggccgctccgggccgcagcgcgagggcagcgaggggcggcggggacctggcaccgggcggggccggcggcagcgaccatgatcgctttgttcaacaagctgctgaactggttcaaggccctattctggaaggaggagatggagctcacgctggtcg

SEQ ID NO: 729 - DNA, 255 bp, Homo Sapiens
gaatcgtcgacccacgcgtccgcccacgcgtccggggaagctcgccttacaactccgcgcggcctcggtcccctgcgccgcccgccccacaacaaaactcagcgcagcgctcccgggcgcccggttcagagcgacctgcggctcagagcggaggggagactgaccggagcgcggatcgggacagcggccgggacagcggcgagacgcgcgtgtgtgagcgcgccggaccaagcgggcccagaagcgggtctgcag

SEQ ID NO: 730 - DNA, 255 bp, Homo Sapiens
gaatcgtcgacccacgcgtccgcgcggctcggcgctcccggcctggcgttgtggcgccgcagcccttgccaccttccctgcacctgccctgcccggcctcatgtaccgcgcgctgtacgcgttccgctcggcggagcccaacgcgctggcgttcgccgcgggcgagaccttcctggtgctagagcgaagcagcgcgcactggtggctggccgcgcgggcgcgcagtggtgagacgggctacgtgccgccagccta

SEQ ID NO: 731 - DNA, 255 bp, Homo Sapiens
gaatcgtcgacccacgcgtccggcggagagcacgccatgaaggcctcgggcacgctacgagagtacaaggtagtgggtcgctgcctgcccacccccaaatgccacacgccgcccctctaccgcatgcgaatctttgcgcctaatcatgtcgtcgccaagtcccgcttctggtactttgtatctcagttaaagaagatgaagaagtcttcaggggagattgtctactgtgggcaggtgtttgagaagtcccccctg

SEQ ID NO: 732 - DNA, 255 bp, Homo Sapiens
gaatcgtcgacccacgcgtccgcggacgcgtgggcaatcgcagcctgtcctacaataatgtgctcaaccctggctcgcctggtggccacgcctgcctcgcccatccagcagttggcgtggccggataccactcaccctacctgcaccctggggcaacgggcgacccaccatggcccctgccccacagcttcagtcccgtgctgggcccccggccccaggagccctcgcctgtgctctacgacatcctgtccagga

SEQ ID NO: 733 - DNA, 255 bp, Homo Sapiens
gaatcgtcgacccacgcgtccgtgacgaccgcgtccacctcgcaggtgcgccagaactaccaccaggactcagaggccgccatcaaccgccagatcaacctggagctctacgcctcctacgtttacctgtccatgtcttactactttgaccgcgatgatgtggctttgaagaactttgccaaatactttcttcaccaatctcatgaggagagggaacatgctgagaaactgatgaagctgcagaaccaacgaggt

SEQ ID NO: 734 - DNA, 255 bp, Homo Sapiens
gaatcgtcgacccacgcgtccggtgatattgtagacatcaagggaatgggtactgttcaaaaaggaatgccccacaagtgttaccatggcaaaactggaagagtctacaatgttacccagcatgctgttggcattgttgtaaacaaacaagttaagggcaagattcttgccaagagaattaatgtgcgtattgagcacattaagcactctaagagccgagatagcttcctgaaacgtgtgaaggaaaatgatcag

SEQ ID NO: 735 - DNA, 255 bp, Homo Sapiens
gaatcgtcgacccacgcgtccgaaggtgacatcctgcattcacaatgtcctgagtggtcagcgctggatcgagcactatggggaggtgctcatccgaaacacacaggacagctcctgccactgcaagatcaccttctgcaaggccaagtactggagttccaatgtccacgaggtgcagggcgctgtgctcagtcggagtggccgtgtcctccaccgactctttgggaagtggcacgaggggctgtaccggggacc

SEQ ID NO: 736 - DNA, 255 bp, Homo Sapiens
gaatcgtcgacccacgcgtccgcgatttcctgtagtgaatcaggcaccggagtgcaggttcgggggtggaatccttgggccgctgggcaagcggcgagacctggccagggccagcgagccgaggacagagggcgcacggagggccgggccgcagccccggccgcttgcagaccccgccatggacccgttcctggtgctgctgcactcggtgtcgtccagcctgtcgagcagcgagctgaccgagctcaagttcct

SEQ ID NO: 737 - DNA, 255 bp, Homo Sapiens
gaatcgtcgacccacgcgtccgccagcccccgcgcccgcccgccagcccgcccagcggtcgggtccgggcgcccgcgcagaatcagctgtctgagctgcccaggcggcgggggagcagcgagcgggcttcagcgagccgcaggaggcacaggcctgtcctgggtccccgcaggtctgcgcgtctgttgttcccagcgctctgagaggcctgaaaaggaagagcaacctgtccagaatccccgcaggaaaggaaaa

SEQ ID NO: 738 - DNA, 255 bp, Homo Sapiens
  misc_feature (62)..(62): n is a, c, g, or t
  misc_feature (66)..(66): n is a, c, g, or t
  misc_feature (160)..(160): n is a, c, g, or t
  misc_feature (210)..(210): n is a, c, g, or t
gaatcgtcgacccacgcgtccgctagttctagatcgcgagcggccctgaagcagcctccggngccncctccgccacccccgccagtgtcggcgcccgcggccgaggccgcgccccccgcctccgccgccactatcgccgcggcggcggccaccgccgtcntagccccaacctcgacggtcgccgtggccccggtcgcgtctgccttgganaagaagacaaagagcaaggggccctacatctgcgctctgtgcgcc

SEQ ID NO: 739 - DNA, 255 bp, Homo Sapiens
gaatcgtcgacccacgcgtccgctacggtggacacagcggccctgaagcagcctccggcgccccctccgccacccccgccagtgtcggcgcccgcggccgaggccgcgccccccgcctccgccgccactatcgccgcggcggcggccaccgccgtcgtagccccaacctcgacggtcgccgtggccccggtcgcgtctgccttggagaagaagacaaagagcaaggggccctacatctgcgctctgtgcgccaag

SEQ ID NO: 740 - DNA, 255 bp, Homo Sapiens
gaatcgtcgacccacgcgtccgggcgtgatgcacggctcccgcatcagctcaaagctgatcttgccacacaggtagtcggggatgtctcgcttctgtggcacaggggcacacggtcagaggctgaaaaggggcactgcacgagcacctgccagccatcggcagcaagcgacacacactcaccttcctcttctcatccacctgagaaaaaagctcgtccatgtccgccatgtacttgtcctgtgaagagttgagtg

SEQ ID NO: 741 - DNA, 255 bp, Homo Sapiens
  misc_feature (190)..(190): n is a, c, g, or t
  misc_feature (230)..(230): n is a, c, g, or t
  misc_feature (233)..(233): n is a, c, g, or t
  misc_feature (247)..(247): n is a, c, g, or t
gaatcgtcgacccacgcgtccgcccacgcgtccgccacaggctctccttgtggggtcccaggtcctgctgccaagagcccctcaagagaagggctgaacctggggagatgtcactgccagggtgaggtggagccacatggcagggacaatgccggcagcctgagcccaggcaccccagtgcccgctgggnccagcctggggacagggaacctgccgggctcacagtgtgngancagctggacaccangcttcttg

SEQ ID NO: 742 - DNA, 255 bp, Homo Sapiens
  misc_feature (163)..(163): n is a, c, g, or t
gaatcgtcgacccacgcgtccggtccgatcttccaggatctcggccggccacagccaagcatcgcagtccccaccggccgttacctgtccgtggcggcgcacggccgaggccctcacctgtgcgggcgcctctctgtggctccctctcctccgggcggtgganatctgggccccaaggctctaccgcgcgctccatcgccggcacgccgccctgagcaaggggacagacagcatcccgcggtcacgcagccatgt

SEQ ID NO: 743 - DNA, 255 bp, Homo Sapiens
gaatcgtcgacccacgcgtccgaaaaagcatccaatcccgtggaggttggcatccaggtcacgccagaggatgacgattgtttatcaacgtcatctagaggaatttgccccaaacaggaacacatagcagataaacttctgcactggaggggcctctcctcccctcgttctgcacatggagctctaatccccacgcctgggatgagtgcagaatatgccccgcagggtatttgtaaagatgagcccagcagctac

SEQ ID NO: 744 - DNA, 255 bp, Homo Sapiens
gaatcgtcgacccacgcgtccggccgccctcgccatggccgcgccggccccgggcctcatctcggtgttctcgagttcccaggagctgggtgcggcgctagcgcagctggtggcccagcgcgcagcatgctgcctggcaggggcccgcgcccgtttcgcgctcggcttgtcgggcgggagcctcgtctcgatgctagcccgcgagctacccgccgccgtcgcccctgccgggccagctagcttagcgcgctggac

SEQ ID NO: 745 - DNA, 255 bp, Homo Sapiens
gaatcgtcgacccacgcgtccgcccacgcgtccgcccacgcgtccgaggctagcctgcgagccacctcctctactcagtctctagctcgcctgggttctcccgattatggcaactcagccctgctcagcttgcctggctaccgccccaccactcgcagttctgctcgtcgttcccaggccggggtgtccagtggggcccctccaggaaggaacagcttctacatgggcacttgccaggatgagcctgagcagctg

SEQ ID NO: 746 - DNA, 255 bp, Homo Sapiens
gaatcgtcgacccacgcgtccggcgcggcggctgctggagccgggggcggcggagccagccgagcgcggcgcggagccggaggcgggcgcggagccggcgggggccgaggtggctgggcccggggccgcagcggcgggggcagtcggggctccggtgcccgtggattgctcggacgaggcgggcaacaccgcactgcagttcgccgcggccgggggccacgaaccgctggtgcgcttcctgctgcgccgcggtgc

SEQ ID NO: 747 - DNA, 255 bp, Homo Sapiens
gaatcgtcgacccacgcgtccggtggttcccaaagatgtcaatgctgccattgccaccatcaagaccaagcgtaccatccagtttgtggattggtgccccactggcttcaaggttggcatcaactaccagcctcccactgtggtgcctggtggagacctggccaaggtacagagagctgtgtgcatgctgagcaacaccacagccattgctgaggcctgggctcgcctggaccacaagtttgacctgatgtatgc

SEQ ID NO: 748 - DNA, 255 bp, Homo Sapiens
gaatcgtcgacccacgcgtccgagaactgctccaccccgctggctctgcccactcgagacctcaatgccacctttgatctctctgaggagcctccctcaaagcccagtttccatgaatgcattggctgggacaaaataccccaggagctgagcaggctggaccagcccttcatccccagggcacctgtgcccctgttcaccatgaagggccccaagccaacatcttccctccctgggacctctgcctgcaagaag

SEQ ID NO: 749 - DNA, 255 bp, Homo Sapiens
gaatcgtcgacccacgcgtccgccaagatggcggatgaagccacgcgacgtgttgtgtctgagatcccggtgctgaagactaacgccggaccccgagatcgtgagttgtgggtgcagcgactgaaggaggaatatcagtcccttatccggtatgtggagaacaacaagaatgctgacaacgattggttccgactggagtccaacaaggaaggaactcggtggtttggaaaatgctggtatatccatgacctcctg

SEQ ID NO: 750 - DNA, 255 bp, Homo Sapiens
gaatcgtcgacccacgcgtccgaaaggcgcggcggggaggggagccggggccccagccctgccgggaaacgggttcccagtcccggccgagagcgcgggcgccgaggggaccgacccggactccccgcaaccccccaaccgccaggccatggcgcccacggggctcctggtggccggcgcctccttcctcgcgttccgggggctgcactgggggttgcggcggctgcccacgccggaatcggccgctcgggaccg

SEQ ID NO: 751 - DNA, 255 bp, Homo Sapiens
gaatcgtcgacccacgcgtccgcgctgttcacgtcccgtcggcctcctgcacagcccacacgctgcgcccggaaggcccctgctgtggagaagccggacccatccccgaggtccccagcgaggacacacactccacgagagcagcccctccactctgcccaggagaggggccgaccctcctcgggaaccggccacccgcgtggctcccagcatccatcaggacaagcccacgtggggtcctccctgcgtgctcag

SEQ ID NO: 752 - DNA, 255 bp, Homo Sapiens
gaatcgtcgacccacgcgtccggcctcggccgcctttgccgcctactgaagccggcgctgctctgtggggctctggccgcgcctggcctggccgggaccatgtgcgcgtcccgggacgactggcgctgtgcgcgctccatgcacgagttttccgccaaggacatcgacgggcacatggttaacctggacaagtaccggggcttcgtgtgcatcgtcaccaacgtggcctcccagtgaggcaagaccgaagtaaac

SEQ ID NO: 753 - DNA, 255 bp, Homo Sapiens
gaatcgtcgacccacgcgtccggctcgcgatgcctctacacaagtatcccgtgtggctctggaagcggctgcagctgcgggagggcatctgttcccgcctgcccggccactacctgcgctccctggaggaggagcggacgcccactcccgtgcactataggcctcatggggccaagttcaagatcaaccccaagaacgggcagcgggagcgtgtggaggacgtgcccattcccatctactttccccccgaatccc

SEQ ID NO: 754 - DNA, 255 bp, Homo Sapiens
gaatcgtcgacccacgcgtccgtgggttctcccgattatggcaactcagccctgctcagcttgcctggctaccgccccaccactcgcagttctgctcgtcgttcccaggccggggtgtccagtggggcccctccaggaaggaacagcttctacatgggcacttgccaggatgagcctgagcagctggatgactggaaccgcattgcagagctgcagcagcgcaatcgagtgtgccccccacatctgaagacctgc

SEQ ID NO: 755 - DNA, 255 bp, Homo Sapiens
gaatcgtcgacccacgcgtccggcctccgcccgcaccgagccgcgggacccgggccgtaccggggaggggccgctccgggccgcagcgcgagggcagcgaggggcggcggggacctggcaccgggcggggccggcggcagcgaccatgatcgctttgttcaacaagctgctggactggttcaaggccctattctggaaggaggagatggagctcacgctggtcgggcttcagtactcgggcaagaccaccttcgt

SEQ ID NO: 756 - DNA, 255 bp, Homo Sapiens
gaatcgtcgacccacgcgtccgaaagatgtcaatgctgccattgccaccatcaagaccaagcgtaccatccagtttgtggattggtgccccactggcttcaaggttggcatcaactaccagcctcccactgtggtgcctggtggagacctggccaaggtacagagagctgtgtgcatgctgagcaacaccacagccattgctgaggcctgggctcgcctggaccacaagtttgacctgatgtatgccaaacgtgc

SEQ ID NO: 757 - DNA, 255 bp, Homo Sapiens
gaatcgtcgacccacgcgtccggaacggctgcaagagaaggacaagcacgccgaggaggtgcggaaaaacaaggagctgaaggaagaggcctccaggtaaagcctagaggccaaagaactttccaggtcagccggacagctccagcagctccacgttccaggcagcctcgcccgccggctgcgctcccagcactggggtttggggggaggggggtggccaaggggcgtttcctctgcttttggtgtttgtacatg

SEQ ID NO: 758 - DNA, 255 bp, Homo Sapiens
gaatcgtcgacccacgcgtccgcagcgagtcgtcggccgccgcgctcgagcctccgcccgcaccgagccgcgggacccgggccgtaccggggaggggccgctccgggccgcagcgcgagggcagcgaggggcggcggggacctggcaccgggcggggccggcggcagcgaccatgatcgctttgttcaacaagctgctggactggttcaaggccctattctggaaggaggagatggagctcacgctggtcgggct

SEQ ID NO: 759 - DNA, 255 bp, Homo Sapiens
gaatcgtcgacccacgcgtccgggtgctggccctgcccacgcctagggctccggcgcgtcacgggcctcagctgggattcccgcgcccctcggacggccacgagactcggacatctttccaggaacagcgtgaggaggacagaagcacccaacaggactgctcaagccacctgcgaacactgctgctaccatgcccaagagaaaggcaaaaggagatgctaaaggtgataaagcaaaggtgaaggatgagccaca

SEQ ID NO: 760 - DNA, 255 bp, Homo Sapiens
gaatcgtcgacccacgcgtccggctgcgcgcgtcggagaggctcctgggaaactcccacggcccagggactttcgaaagcagagcgaggagccctcgcacgcgctagtctgcgagtgagcgctcagcccggcacctgttcctccagcgccgccgccttcccacccctcggacccgcgccgctcgcggcgcccgcccgttcctgcgatgaatccggccctaggcaaccagacggacgtggcgggcctgttcctggc

SEQ ID NO: 761 - DNA, 255 bp, Homo Sapiens; identical to SEQ ID NO: 747

SEQ ID NO: 762 - DNA, 255 bp, Homo Sapiens
gaatcgtcgacccacgcgtccggcctgatcgccgccatcatgggtcgcatgcatgctcccgggaagggcctgtcccagtcggctttaccctatcgacgcagcgtccccacttggttgaagttgacatctgacgacgtgaaggagcagatttacaaactggccaagaagggccttactccttcacagatcggtgtaatcctgagagattcacatggtgttgcacaagtacgttttgtgacaggcaataaaatttta

SEQ ID NO: 763 - DNA, 255 bp, Homo Sapiens
  misc_feature (25)..(25): n is a, c, g, or t
  misc_feature (27)..(27): n is a, c, g, or t
  misc_feature (32)..(32): n is a, c, g, or t
  misc_feature (61)..(61): n is a, c, g, or t
  misc_feature (83)..(83): n is a, c, g, or t
  misc_feature (88)..(88): n is a, c, g, or t
  misc_feature (96)..(96): n is a, c, g, or t
  misc_feature (114)..(114): n is a, c, g, or t
  misc_feature (116)..(116): n is a, c, g, or t
  misc_feature (123)..(123): n is a, c, g, or t
  misc_feature (144)..(144): n is a, c, g, or t
  misc_feature (153)..(153): n is a, c, g, or t
  misc_feature (164)..(164): n is a, c, g, or t
  misc_feature (166)..(166): n is a, c, g, or t
  misc_feature (174)..(174): n is a, c, g, or t
  misc_feature (192)..(193): n is a, c, g, or t
  misc_feature (214)..(214): n is a, c, g, or t
  misc_feature (224)..(224): n is a, c, g, or t
  misc_feature (233)..(233): n is a, c, g, or t
  misc_feature (241)..(242): n is a, c, g, or t
  misc_feature (247)..(247): n is a, c, g, or t
  misc_feature (254)..(254): n is a, c, g, or t
gaatcgtcgacccacgcgtccgccnanacgtncgcccacgctttgcgcgataagtgctcgnccgcctttgtcctgcctactgnatgcnggcgctgngtctgtggggctctggcngnggcctgnccctgggacggacagcatgtnctcgtcccnggaggactggntntgtgcgcnctccatgcacgagttttnngccaaggagatcaacgggcanatggtttaanctgaacaantaccgggnnttctngtgcatng

SEQ ID NO: 764 - DNA, 255 bp, Homo Sapiens
gaatcgtcgacccacgcgtccgcccacgcgtccgcagagcatcatcagcaccgtgggccaagctttcgagctgcgcttcaagcagtacctgcacagcccgcccaaggtggcgctgcccccagaaaggctggcagggccggaggagtcggcctggggggacgaggaggactctttggagcacaattactacaacagcatcccggggaaggagccgccgctgggcgggctagtggactccaggctggccctgacaca

SEQ ID NO: 765 - DNA, 255 bp, Homo Sapiens
gaatcgtcgacccacgcgtccggaggagggttgagctgctgccgccgccgcctctgtcgtcgtcgcgagtgtggagtcgggactggagctgctgccgcggcgacgccggggatctttgtcgctagctcccggcccttctgccccgccgccttccctcagtcagcgttgcccactcctctccggccgggcgcccctgcctccatttctcgctctctgtccaccacacacacggcccccccgatcatggatccgggc

SEQ ID NO: 766 - DNA, 255 bp, Homo Sapiens
gaatcgtcgacccacgcgtccgctccccgccgccgccctcgccatggccgcgccggccccgggcctcatctcggtgttctcgagttcccaggagctgggtgcggcgctagcgcagctggtggcccagcgcgcagcatgctgcctggcaggggcccgcgcccgtttcgcgctcggcctgtcgggcgggagcctcgtctcgatgctagcccgcgagctacccgccgccgtcgcccctgccgggccagctagcttagc

SEQ ID NO: 767 - DNA, 255 bp, Homo Sapiens
gaatcgtcgacccacgcgtccggcggcgaacgcggagagcacgccatgaaggcttcgggcacgctacgagagtacaaggtagtgggtcgctgcctgcccacccccaaatgccacacgccgcccctctaccgcatgcgaatctttgcgcctaatcatgtcgtcgccaagtcccgcttctggtactttgtatctcagttaaagaagatgaagaagtcttcaggggagattgtctactgtgggcaggtgtttgagaag

SEQ ID NO: 768 - DNA, 255 bp, Homo Sapiens
gaatcgtcgacccacgcgtccgggctcggggcgccgaggcttccgcgcccgctggttcctcgctccggggcggagctcgcgatagcgaccgggagcagggcgcggggcgggacccaggtccgaggcgaggaagccggaagccaggcgcggggagcctcccccttcgactgcagcctcgctccgtgccttctgcgcgcctgggatcccggagcctgcctaggttctgtgcgctcccgcccaggccggtgcccgccg

SEQ ID NO: 769 - DNA, 255 bp, Homo Sapiens
gaatcgtcgacccacgcgtccgcggacgagaagccctaccagtgcccggtgtgccagcagcgcttcaagcgcaaggaccgcatgagctaccacgtgcgctcacatgacggcgctgtgcacaagccctacaactgctcccactgtggcaagagcttctcccggccggatcacctcaacagtcacgtcagacaagtgcactcaacagaacggcccttcaaatgtgagaaatgtgaggcagctttcgccacgaaggat

SEQ ID NO: 770 - DNA, 255 bp, Homo Sapiens
  misc_feature (11)..(11): n is a, c, g, or t
  misc_feature (14)..(14): n is a, c, g, or t
  misc_feature (29)..(29): n is a, c, g, or t
  misc_feature (32)..(32): n is a, c, g, or t
  misc_feature (70)..(70): n is a, c, g, or t
  misc_feature (80)..(80): n is a, c, g, or t
  misc_feature (86)..(86): n is a, c, g, or t
  misc_feature (90)..(90): n is a, c, g, or t
  misc_feature (95)..(95): n is a, c, g, or t
  misc_feature (108)..(108): n is a, c, g, or t
  misc_feature (120)..(120): n is a, c, g, or t
  misc_feature (145)..(145): n is a, c, g, or t
  misc_feature (179)..(179): n is a, c, g, or t
  misc_feature (192)..(192): n is a, c, g, or t
  misc_feature (198)..(198): n is a, c, g, or t
  misc_feature (210)..(210): n is a, c, g, or t
gaatcgttganccncgcgtccgggcggantcngggcgcagaggcgttccgcgcccgctggttcctcgctncggggcgganctcgcnatancgacngggagcagggcgnggggcgggaccnatgtccgaggcgaggaagccggaanccaggcgcggggagcctcccccttcgactgcagnctcgctccgtgcnttctgngcgcctgggatnccggagcctgcctaaagttctgtgcgctcccgcccaggcaggtgc

SEQ ID NO: 771 - DNA, 255 bp, Homo Sapiens
gaatcgtcgacccacgcgtccgcccacgcgtccgattctggagaagccggtggacaagcaggacgcctacaggatgctgtcccggttgagtgggagagaacacagcgtgttcacaggtgtcgcgatcgtccactgctccagcaaagaccatcagctggacaccagggtctcggaattctacgaggaaacgaaggtgaagttctcggagctgtccgaggagctgctctgggaatacgtccacagcggggagcccat

SEQ ID NO: 772 - DNA, 229 bp, Homo Sapiens
  misc_feature (19)..(19): n is a, c, g, or t
  misc_feature (34)..(34): n is a, c, g, or t
  misc_feature (165)..(165): n is a, c, g, or t
  misc_feature (167)..(168): n is a, c, g, or t
  misc_feature (178)..(178): n is a, c, g, or t
  misc_feature (180)..(180): n is a, c, g, or t
  misc_feature (185)..(186): n is a, c, g, or t
  misc_feature (188)..(188): n is a, c, g, or t
  misc_feature (190)..(190): n is a, c, g, or t
  misc_feature (201)..(201): n is a, c, g, or t
  misc_feature (211)..(211): n is a, c, g, or t
  misc_feature (214)..(215): n is a, c, g, or t
  misc_feature (217)..(219): n is a, c, g, or t
  misc_feature (221)..(222): n is a, c, g, or t
  misc_feature (224)..(224): n is a, c, g, or t
  misc_feature (228)..(228): n is a, c, g, or t
gaatcgtcgacccacgcgntccgggcttggcggnttggagcggctgtcgccatgtttgtcggtagcagcccgctcgggcccgttcgcgcccgtcctgtcggccacgtcccgcggggtggcgggcgcgctgcggcccttggtgcaggccacggtgcccgcaacccngnnggacgtggtngngaggnngngngcgaacgtccncgagcgggangcnntnnncnncntggng

SEQ ID NO: 773 - DNA, 255 bp, Homo Sapiens
gaatcgtcgacccacgcgtccgccggcgggggagggggagaggcgggtgccggcggcggcgctgccgcagtggccgccggtggcgtggtgaccacgaccgcctcggggaagcgcatccggaagaaccatgcctgcgagatgtgtggcaaggccttccgcgacgtctaccacctgaaccgacacaagctgtcgcactcggacgagaagccctaccagtgcccggtgtgccagcagcgcttcaagcgcaaggaccgc

SEQ ID NO: 774 - DNA, 255 bp, Homo Sapiens
gaatcgtcgacccacgcgtccggcgcgcacttccgggcacggtcagggcgtgacgtcgggaggagggcagacacgccgctttttggatgcctcctatgcctggcgggagtcttgtctgagctggcaccaccacacggcccacgacatcttcgcagggaagcctgtggaccctctgccaggctccacaagaggtcaggacagtgcagtgtgttcacaaggccagtttctgatcgtccgccccgaggctgaggacca

SEQ ID NO: 775 - DNA, 255 bp, Homo Sapiens
gaatcgtcgacccacgcgtccgccccagagtccaggccagtccccgccgtcacccggtgcgaacccgcgagaggcctagtgcagctggcagccccgccccggcacccgcctgctcttctcgcgggtccggaccgcgagcgcgggggccgacgggtcgccgctgcgccgggccgggatggcggccaccgcgctgctggaggccggcctggcgcgggtgctcttctacccgacgctgctctacaccctgttccgcgg

SEQ ID NO: 776 - DNA, 255 bp, Homo Sapiens
gaatcgtcgacccacgcgtccggggtcacaacggggtcagaagcatgcggggggtcagggcagagcccgcgtgacccccaaagtagtcccctgtcgctcatcgccaggttctcgccgatcgccatcgatggtatgagcggcctggcgggcgtgggcctgtcggggggcgcggcgggcgccggctggtgcatcttcgtgtacaacctgtcaccggaggcagacgagagcgtgctgtggcagctgttcgggcctttt

SEQ ID NO: 777 - DNA, 255 bp, Homo Sapiens
gaatcgtcgacccacgcgtccgctctgttcacttgcagataccatacagagccttcattcattcattcattgacaatgaatgtggggtgcccctctgtaaccagacctggatcaagacgcctgcctccccagactcagccactgcccacttcagcttctgccggaccctcctggagcacacggtgtcagctgagagcatcccctgccacttgcctcggacacctggcaccagcctcacgtggcatgactcccgca

SEQ ID NO: 778 - DNA, 255 bp, Homo Sapiens; identical to SEQ ID NO: 747

SEQ ID NO: 779 - DNA, 255 bp, Homo Sapiens
gaatcgtcgacccacgcgtccgtgcgggctcatcctcaattcttagcgatggagtgtacgagaggcacatggaccctctgctgctaccaggcgagctcgcgagccccagccaggcccttggagctggggagatcccggcaccttctgagacaccctggctttctccggaccccctgtttctggaacagaggagggtcagagaagcaaagaccgaagaggacggccctgccaacaccgagcagaagctgaagtcct

SEQ ID NO: 780 - DNA, 255 bp, Homo Sapiens
gaatcgtcgacccacgcgtccgcccacgcgtccgagcagagtattggtgctgctggaagccagaaggaaggtccagagggagccaacctgttcatctaccacctgccccaggagtttggtgatcaggacctgctgcagatgtttatgccctttgggaatgtcgtgtctgccaaggttttcatagacaagcagacaaacctgagcaagtgttttggttttgtaagttacgacaatcctgtttcggcccaagctgcc

SEQ ID NO: 781 - DNA, 255 bp, Homo Sapiens
gaatcgtcgacccacgcgtccgggggtaccttcccaggctgcctggctgaccagctggttttaaagcgccggggtaaccagttggagatctgtgccgtggtcctgaggcagttgtctccacacaagtactacttcctcgtgggctacagtgaaactttgctgtcctacttttacaaatgtcctgtgcgactccacctccaaactgtgccctcaaaggttgtgtataagtacctctagaacaatccccttttttcc

SEQ ID NO: 782 - DNA, 255 bp, Homo Sapiens
gaatcgtcgacccacgcgtccggcggcggccgagcctggaaacctggccggcgtcaggcacatcatcctggtcctctcaggaaaggggggcgttgggaaaagcaccatctccacggagctggccctggcactgcgccatgcaggcaagaaggtgggaatcctggatgtggacctgtgtggccccagtataccccgcatgctcggggcgcagggcagggctgtgcaccagtgcgaccgcggctgggcacccgtctt

SEQ ID NO: 783 - DNA, 255 bp, Homo Sapiens
  misc_feature (140)..(140): n is a, c, g, or t
  misc_feature (159)..(159): n is a, c, g, or t
  misc_feature (162)..(162): n is a, c, g, or t
  misc_feature (167)..(167): n is a, c, g, or t
  misc_feature (171)..(171): n is a, c, g, or t
  misc_feature (173)..(173): n is a, c, g, or t
  misc_feature (181)..(181): n is a, c, g, or t
  misc_feature (192)..(192): n is a, c, g, or t
  misc_feature (195)..(195): n is a, c, g, or t
  misc_feature (201)..(202): n is a, c, g, or t
  misc_feature (206)..(207): n is a, c, g, or t
  misc_feature (210)..(210): n is a, c, g, or t
  misc_feature (215)..(215): n is a, c, g, or t
  misc_feature (219)..(220): n is a, c, g, or t
  misc_feature (222)..(222): n is a, c, g, or t
  misc_feature (229)..(229): n is a, c, g, or t
  misc_feature (239)..(239): n is a, c, g, or t
  misc_feature (246)..(246): n is a, c, g, or t
  misc_feature (251)..(252): n is a, c, g, or t
gaatcgtcgacccacgcgtccggccgggacagcggcggcgccgcgggcggccccggcctccgctcgcgctccggctgcggccccgactcctgctcggactccggcccgggtcccggctcctccagcggcgctcgccgcancagctccggcggcagctcnagnggtgnctgnanacgcgacntcctcctcctncgncgctgnngccnnctnagccntcgnnancttcaancaatgactgntcagccngcaannaga

SEQ ID NO: 784 - DNA, 255 bp, Homo Sapiens
gaatcgtcgacccacgcgtccgatttggaacattatctggacagtattgaaaaccttccctttgaattacagagaaactttcagctcatgagggacctagaccaaagaacagaggacctgaaggctgaaattgacaagttggccactgagtatatgagtagtgcccgcagcctgagctccgaggaaaaattggcccttctcaaacagatccaggaagcctatggcaagtgcaaggaatttggtgacgacaaggtg

SEQ ID NO: 785 - DNA, 255 bp, Homo Sapiens
gaatcgtcgacccacgcgtccgtgaattggtgcgtcatttccgacatggaagtcatcgagctgaacaaatgcacctcgggccaatcctttgaagtcatcctgaagccaccctcctttgatggggttcccgagttcaacgcctccctgccaaggcggcgagacccatccctggaagagatccagaagaaactagaagcggctgaggagcgaaggaagtaccaggaagcggagctcctgaaacacctagcagagaaa

SEQ ID NO: 786 - DNA, 255 bp, Homo Sapiens
gaatcgtcgacccacgcgtccgcccacgcgtccggggcgccgcgggtgccggtgagaggagcagggccggtcctggggacccgcttcgggggtgggaaggggctgcgaggcggggtcctgctccctcccagcggaaggcggcctgggacccagtcagaccgcggtgcatcccaaacctcccagcgacccttggttggagaaacgggcagagaccctgcagggggtggcccgggccctgcgtgtcctctggggcct

SEQ ID NO: 787 - DNA, 255 bp, Homo Sapiens
gaatcgtcgacccacgcgtccggctggatccgcgcacacccagtggcggcggatgggcggccggggcggccggggcggccggtcctgagcgcggcccgggctgtcagggctggctgctggcgggatggacaccctggaggaggtgacttgggccaatgggagcacagcgctacccccacccctggcaccaaacatcagtgtgcctcatcgctgcctgctgctgctctacgaagacattggcacctccagggtccg

SEQ ID NO: 788 - DNA, 255 bp, Homo Sapiens
gaatcgtcgacccacgcgtccgcccagatctacccagacccggagctggaagtacaagtattgggcctgcctatccgctgcatccacagtgaggagggctgccgctggagtgggccactacgtcatctacagggccacctgaatacctgcagcttcaatgtcattccctgccctaatcgctgccccatgaagctgagccgccgtgatctacctgcacacttgcagcatgactgccccaagcggcgcctcaagtgc

SEQ ID NO: 789 - DNA, 255 bp, Homo Sapiens
gaatcgtcgacccacgcgtccgccgaacttccggctctcactgctaggggcttaagcggagggagtcgagccagcgtcgccgcgatggtgttgttggagagcgagcagttcctgacggagctgaccagacttttccagaagtgccggacgtcgggcagcgtctatatcaccttgaagaagtatgacggtcgaaccaaacccattccaaagaaaggtactgtggagggctttgagcccgcagacaacaagtgtctg

SEQ ID NO: 790 - DNA, 255 bp, Homo Sapiens
gaatcgtcgacccacgcgtccgctgcgagccaggattcccgatccagagacaatggccccgatgggatggagcccgaaggcgtcatcgagagtaactggaatgagattgttgacagctttgatgacatgaacctctcggagtcccttctccgtggcatctacgcctatggttttgagaagccctctgccatccagcagcgagccattctaccttgtatcaagggttatgatgtgattgctcaagcccaatctggg

SEQ ID NO: 791 - DNA, 255 bp, Homo Sapiens
gaatcgtcgacccacgcgtccgcccacgcgtccgcaccagcatcctgcacaacctctcccaccaccgggaggggctgctcgccatcttcaagtcgggtggcatccctgctctggtccgcatgctcagctcccctgtggagtcggtcctgttctatgccatcaccacgctgcacaacctgctcctgtaccaggagggcgccaagatggccgtgcgcctggccgacgggctgcaaaagatggtgcccctgctcaaca

SEQ ID NO: 792 - DNA, 255 bp, Homo Sapiens
gaatcgtcgacccacgcgtccggtcatctcggacaccaccaagctgctgaagcccatcctggtcttcgcctttgccatcgccgcgggcgtatgcgggctcacgcagatcacgcagtaccgcagccaccctgtggacgtgtatgccggcttcctcatcggggcgggcatcgctgcctacctggcctgccacgcggtgggcaacttccaggccccacctgcagagaagcccgcggccccggcccccgccaaggacgc

SEQ ID NO: 793 - DNA, 255 bp, Homo Sapiens
gaatcgtcgacccacgcgtccgccaggcgcccgcccgccgcgcgtgattctcgcctcgccgcagcccagccctgcgcgccttgcccggcggcccccgcccggccgctccgggcccctggccccgcggagcgatgctgctgctggctgccgccttcctcgtggccttcgtgctgctgctgtacatggtgtctccgctcatcagccccaagcccctcgccctgcccggggcgcatgtggtggttacaggaggttcca

SEQ ID NO: 794 - DNA, 255 bp, Homo Sapiens
gaatcgtcgacccacgcgtccgcgagcctccgcccgcaccgagccgcgggacccgggccgtaccggggaggggccgctccgggccgcagcgcgagggcagcgaggggcggcggggacctggcaccgggcggggccggcggcagcgaccatgatcgctttgttcaacaagctgctggactggttcaaggccctattctggaaggaggagatggagctcacgctggtcgggcttcagtactcgggcaagaccacctt

SEQ ID NO: 795 - DNA, 171 bp, Homo Sapiens
  misc_feature (132)..(132): n is a, c, g, or t
  misc_feature (149)..(149): n is a, c, g, or t
  misc_feature (154)..(154): n is a, c, g, or t
gaatcgtcgacccacgcgtccggtccctgtgaccggcttggcggttggagcggctgtcgccatgttgtcggtagcagcccgctcgggcccgttcgcgcccgtcctgtcggccacgtcccgcggggtggcggncgcgctgcggcccttgntgcangccacggtgcccgcaac

SEQ ID NO: 796 - DNA, 255 bp, Homo Sapiens
gaatcgtcgacccacgcgtccgcccacgcgtccgcccacgcgtccgcccacgcgtccggcgtggggcgcccacaatttgcgcgctctctttctgctgctccccagctctcggatacagccgacaccatgggtttcggagacctgaaaagccctgccggcctccaggtgctcaacgattacctggcggacaagagctacatcgaggggtatgtgccatcacaagcagatgtggcagtatttgaagccgtgtccagc

SEQ ID NO: 797 - DNA, 255 bp, Homo Sapiens
  misc_feature (133)..(133): n is a, c, g, or t
gaatcgtcgacccacgcgtccgacagagcagagcaagtcggagctgagctcacggctggacacgctgagtgcggagaaggatgctctgagtggagctgtgcggcagcgggaggcagacctgctggcggcgcanagcctggtgcgcgagacagaggcggcgctgagccgggagcagcagcgcagctcccaggagcagggcgagttgcagggccggctggcagagagggagtctcaggagcaggggctgcggcagag

SEQ ID NO: 798 - DNA, 255 bp, Homo Sapiens
gaatcgtcgacccacgcgtccggtcagctgaatgtaaaagacagtgatctcacgcggaggggaagatgtttgccatcaaaatgtgacagaagagacacgctgcatggctcggaacgcatctccttggtggtgggggaaagagacttagaggagagaggctgcgccctggcccagcctggctcggctcagctccgcgcgccatggcaagctcggcttccctggagaccatggtgcccccggcctgcccgcgcgccg

SEQ ID NO: 799 - DNA, 255 bp, Homo Sapiens
gaatcgtcgacccacgcgtccgtgaataagtcgtcctacaaatatgaagcagacacggtggacctgaattggtgcgtcatttccgacatggaagtcatcgagctgaacaaatgcacctcgggccaatcctttgaagtcatcctgaagccaccctcctttgatggggttcccgagttcaacgcctccctgccaaggcggcgagacccatccctggaagagatccagaagaaactagaagcggctgaggagcgaagg

SEQ ID NO: 800 - DNA, 255 bp, Homo Sapiens
gaatcgtcgacccacgcgtccgacaagctgtcgcactcggacgagaagccctaccagtgcccggtgtgccagcagcgcttcaagcgcaaggaccgcatgagctaccacgtgcgctcacatgacggcgctgtgcacaagccctacaactgctcccactgtggcaagagcttctcccggccggatcacctcaacagtcacgtcagacaagtgcactcaacagaacggcccttcaaatgtgagaaatgtgaggcagct

SEQ ID NO: 801 - DNA, 255 bp, Homo Sapiens
gaatcgtcgacccacgcgtccggccagctgtgcgaccacgcgtgctcgcaggccagcaagctcaagcgccacatgaagacgcacatgcacaaggccggctcgctggccggccgctccgacggtgacttccgccaccacgagagcgacccgtcgctgggccacgagccggaggaggaggacgaggaggaggaggaggaggaggaggagctgctactggagaacgagagccggcccgagtcgagcttcagcatggac

SEQ ID NO: 802 - DNA, 255 bp, Homo Sapiens
gaatcgtcgacccacgcgtccgccaagatgccgcccaaaggaaaaagtggttctggaaaagcggggaaagggggagcagcctctgggagtgacagtgctgacaagaaggctcaaggtcccaaaggtggtggcaatgcagtaaaggtcagacacattctatgtgaaaaacatggcaaaatcatggaagccatggaaaagttaaagtctgggatgagattcaatgaagtggccgcacagtatagtgaagataaagcc

SEQ ID NO: 803 - DNA, 255 bp, Homo Sapiens
  misc_feature (24)..(24): n is a, c, g, or t
  misc_feature (75)..(75): n is a, c, g, or t
gaatcgtcgacccacgcgtccggncgcgctcgcagcatcgcaggcgccgcgtagccgtcgccaccgccgccagcncgtgcgccctcggcgcgtacccgccgcgctcccatccccgccgccggccaggggcgcgctcggccgccccggacagtgtcccgctgcggctccgcggcgatggccaccaagatcgacaaagaggcttgccgggcggcgtacaacctggtgcgcgacgacggctcggccgtcatctgggtg

SEQ ID NO: 804 - DNA, 255 bp, Homo Sapiens
gaatcgtcgacccacgcgtccgggcaaaaagcaattgcagaagttgatgtgggtacagataaggcccagaattctgacccgatacttgatacttcatcactagttcctggatgttcctctgtagataacatcaagtcatctcaaacctcacaaaaccagggacttggacgtcctactcttgaaggtgatgaagagacttcagaggttgagtacacagtgaataagggcccagcttccagcaatagagacagggta

SEQ ID NO: 805 - DNA, 255 bp, Homo Sapiens
gaatcgtcgacccacgcgtccgcgatcgccggctgctgcacgactgtcagcagatgctcatgcgcctgggcggtgggaccactgtcacttccagctagaccccgtgtccccggcctcagcacccctgtctctagccactttggtcccgtgcagcttctgtcctgcgtcgaagctttgaaggccgaaggcagtgcaagagactctggcctccacagttcgacctgcggctgctgtgtgccttcgcggtggaaggcc

SEQ ID NO: 806 - DNA, 255 bp, Homo Sapiens
gaatcgtcgacccacgcgtccgcccacgcgatccgaagagatcgagctccctggctgccggctcgccttctgcgtggagttctcgcggtctgggtttcgctgtctgctcttggcccggggtcattttgtcggcgtcgggtgccctctcttgcccagctggggcacagcgaggcggccccttctcccgacgacgttcgatggagtagggtcccagaccgttgtcccgaagagcgagatcgagcttggccccctccc

SEQ ID NO: 807 - DNA, 255 bp, Homo Sapiens
gaatcgtcgacccacgcgtccgcccacgcgtccggccgaccatggtgcccctgagcctcctgagcgtgccccagctgagcggagccggcgggggagggggagaggcgggtgccggcggcggcgctgccgcagtggccgccggtggcgtggtgaccacgaccgcctcggggaagcgcatccggaagaaccatgcctgcgagatgtgtggcaaggccttccgcgacgtctaccacctgaaccgacacaagctgtcgc

SEQ ID NO: 808 - DNA, 255 bp, Homo Sapiens
gaatcgtcgacccacgcgtccgcacacagggcgtgcaggccccagcgtggggaggaacgacattcgagtgcagctgctcgactatgtcatcagctccttttaccccgagatccaggctgctcatgccagcgacagcgtgcagagaaatgctgccttcttccgggaggtgacgcggcgcacggcgcggatggtggccgagtggcagtgtgtgggcttctgccacggcgtgctcaacaccgacaacatgagcatcct

SEQ ID NO: 809 - DNA, 255 bp, Homo Sapiens
gaatcgtcgacccacgcgtccgggcaaaaagagaagaaagaaaggggagggggcgagtcacaggcggcggtggcggcggcagcagctgccggagcggaggcaacgagcagtccgagaaaaaccagcagcagcggcggcggcggcggcggcggcgcccaccccgaccagctgcagcatctgcatccccgctcctgggaactggagcgagcggtgccgggccagcaggcgaggggggcgacgcgcagacagcgggtc

SEQ ID NO: 810 - DNA, 255 bp, Homo Sapiens
gaatcgtcgacccacgcgtccggcaagaatgaggtgctgcgcagcaaggtgtctcggctcacggagcggctccgcaagcgctaccccaccaacaacttcgggaactgcacgggctgctcggccaccttctcagtgctgaagaagaggcggagctgcagtaattgtggaaacagcttctgctctcgatgctgctccttcaaggtgcccaagtcctccatgggggccacagcccctgaagcccagagggagactgtg

SEQ ID NO: 811 - DNA, 255 bp, Homo Sapiens
gaatcgtcgacccacgcgtccgccatgacgaccgcgtccacctcgcaggtgcgccagaactaccaccaggactcagaggccgccatcaaccgccagatcaacctggagctctacgcctcctacgtttacctgtccatgtcttactactttgaccgcgatgatgtggctttgaagaactttgccaaatactttcttcaccaatctcatgaggagagggaacatgctgagaaactgatgaagctgcagaaccaacga

SEQ ID NO: 812 - DNA, 255 bp, Homo Sapiens
gaatcgtcgacccacgcgtccgggtcggaaaaaagggagaagaaaccggcaccctctctgagaggcaacagaagcagcaattgtttcagcgaaaaaagcagcaagggagggagtgaaggaaaaaagcaaaaaagggggcgacacgcaagtgcctgtaggggtgaaaggagcagggaccggcgatctagggggggatcagctacaaaagaaactgtcactgggagcggtgcggccaaggaggaagcagtgctgcca

SEQ ID NO: 813 - DNA, 255 bp, Homo Sapiens
gaatcgtcgacccacgcgtccgcccacctttgcagatatctgcacctcaggagagactgtattccacgtggattgggggctccatccttgcctccctggacacctttaagaagatgtgggtctccaaaaaggaatatgaggaagacggtgcccgatccatccacagaaaaaccttctaatgtcgggacatcatcttcacctctctctgaagttaactccactttaaaactcgctttcttgagtcggagtgtttgc

SEQ ID NO: 814 - DNA, 255 bp, Homo Sapiens
gaatcgtcgacccacgcgtccggcagggttcagaaggaaggtggcacgtgggcacgttctcctggtaactggtctacatggctgccgactgcaactcctgttagccacaggctgacccagcagcggccggagcttggcggccgggggtgtttccggtgctgggggctcacgtggcccaggaggctgcttccagctcattcctgcacctcccaaactctgcacggagaggagctccttcctcacgccaaagggtgc

SEQ ID NO: 815 - DNA, 255 bp, Homo Sapiens
gaatcgtcgacccacgcgtccgagcgcagcctggcctggggcccggtcgagcccgcgccatggcggccgaggcgacagctgtggccggaagcggggctgttggcggctgcctggccaaagacggcttgcagcagtctaagtgcccggacactaccccaaaacggcggcgcgcctcgtcgctgtcgcgtgacgccgagcgccgagcctaccaatggtgccgggagtacttgggcggggcctggcgccgagtgcagc

SEQ ID NO: 816 - DNA, 255 bp, Homo Sapiens
gaatcgtcgacccacgcgtccgcccacgcgtccggatcccgccggaagcgccaggacaatggggacccgggacgacgagtacgactacctattcaaagtggtgctcatcggggactcaggcgtgggcaagagcaacctgctgtcgcgcttcacccgcaacgagttcaacctggagagcaagagcaccatcggcgtggagttcgccacccgcagcatccaggtggacggcaagaccatcaaggcgcagatctggga

SEQ ID NO: 817 - DNA, 255 bp, Homo Sapiens
gaatcgtcgacccacgcgtccgggttagtttctgcgacttgtgttgggactgctgataggaagatgtcttcaggaaatgctaaaattgggcaccctgcccccaacttcaaagccacagctgttatgccagatggtcagtttaaagatatcagcctgtctgactacaaaggaaaatatgttgtgttcttcttttaccctcttgacttcacctttgtgtgccccacggagatcattgctttcagtgatagggcagaa

SEQ ID NO: 818 - DNA, 255 bp, Homo Sapiens
gaatcgtcgacccacgcgtccgaccgcggggaggctcacctcgagctgaacgccttccgcaggaagcatgattgtgccctggtcatctcgggagacttcctggaggtttgcctcaagtactatgagtacgagttcatggagctggcctgccagtgcccggccgtagtctgctgccgatgtgcccccacccagaaggcccagatcgtgcgcctgcttcaggagcgcacgggcaagctcacctgtgcactcagtaaa

SEQ ID NO: 819 - DNA, 255 bp, Homo Sapiens
gaatcgtcgacccacgcgtccgtgatcactacctgctatggagggcggaaccggaaagtggctgaggcctttgcgcgtacaggaaagtccattgagcagctggagaaagagttgctgaatgggcagaaactgcaggggcccgagacagcccgggagctatacagcatcctccagcacaagggcctggtagacaagtttcccttgttcatggctgtgtacaaggtgtgctacgagggccagccagtgggtgaattc

SEQ ID NO: 820 - DNA, 255 bp, Homo Sapiens
gaatcgtcgacccacgcgtccggccgggcgcctcttgcaatggagacggtcatttcttcagatagctccccagctgtggaaaatgagcatcctcaagagaccccagaatccaacaatagcgtgtatacttccttcatgaagtctcatcgctgctatgacctgattcccacaagctccaaattggttgtatttgatacgtccctgcaggtgaagaaagctttttttgctttggtgactaacggtgtacgagctgcc

SEQ ID NO: 821 - DNA, 255 bp, Homo Sapiens
gaatcgtcgacccacgcgtccgctcgcaggcaccatgactcctgtgaggatgcagcactccctggcaggtcagacctatgccgtgcccctcatccagccagacctgcggcgagaggaggccgtccagcagatggcggatgccctgcagtacctgcagaaggtctctggagacatcttcagcaggtagagcagagccggagccaggtgcaggccattggagagaaggtctccttggcccaggccaagattgagaag

SEQ ID NO: 822 - DNA, 255 bp, Homo Sapiens
  misc_feature (19)..(19): n is a, c, g, or t
gaatcgtcgacccacgcgntccgagaacccaaagaaaggcaaagagtcctgcccggcaccggcgccgcgtgggccaaacctgcgcccgtggaggggcgcgcagagggcaccgggcgccgggagcaggcggcgcagcaccagcattgtgttagtgccgggaggccactgtgtcagcaagctgagagggaaactgaagcaagatgtcgggccggagtgggaagaagaaaatgtccaagctgtcccgttcagctaggg

SEQ ID NO: 823 - DNA, 255 bp, Homo Sapiens
gaatcgtcgacccacgcgtccggagctttccttctttgtcgtttttcttgtggatttatctttctttttatgtttggcagcttgatgatcacatttagtttgactcctttgtacccacactgggagaagcaaagaagaacacttggccttaaaggatgggcaaggctgggcacagtggcccacacctggatcccagccttagaggatgggcgaggccgggcacagtggcccacacctggatcccagccttagagg

SEQ ID NO: 824 - DNA, 255 bp, Homo Sapiens
gaatcgtcgacccacgcgtccgggccttgccccgctctgcagcacagacaggccagatgcatttgtcctttgcctagctactccccaggtagagagtgctcctggtggcctggcaggtctgggcccttctctccctgcccaggttgtccctggagggcagccctcactccctttgggggagaggcagacattgctgcccacagacctgcctctgactcaactgtgtccaccctccctggtccctacccccaagtc

SEQ ID NO: 825 - DNA, 255 bp, Homo Sapiens
gaatcgtcgacccacgcgtccgggcgagccttccgccgcagctccgggctgagccagcatcgccgcacgcacagcggcgagaagccgtaccgctgccccgactgcgggaagtccttcagccacggtgccaccctggctcagcaccgtggcatccacactggggcgcggccgtaccagtgcgcggcctgcggcaaggccttcggctggcgctccacgctgctgaaacatcgcagcagccacagcggggagaagccg

SEQ ID NO: 826 - DNA, 255 bp, Homo Sapiens
gaatcgtcgacccacgcgtccgattcattcaccatccaggcctatgattgtgggaagggacctgatggcaccaacgtgaaaaagtctcataaagcaactgttcatattcaggtgaacgacgtgaatgagtacgcgcccgtgttcaaggagaagtcctacaaagccacggtcatcgaggggaagcagtacgacagcattttgagggtggaggccgtggatgccgactgctcccctcagttcagccagatttgcagc

SEQ ID NO: 827 - DNA, 255 bp, Homo Sapiens
gaatcgtcgacccacgcgtccggagaagaagaatgtgggcaaggtcctcctggttccagggccagagaaggagaactagggcaagtggctgtgagaccctagagaccagcgaagggagaagttgggaagctacgttctgttggccaccagacttgcatttcagcctctgtcataatgctctgccctccctcccccgaagttctctgtggtgatgaccgctctcccctgcccctccccgcttcctgacctctgaag

SEQ ID NO: 828 - DNA, 255 bp, Homo Sapiens
gaatcgtcgacccacgcgtccgcccacgcgtccgcggacgcgtgggcaaattatgctgcagcatattgtactggcctgctgctggcccgcaggcttctcaataggtttggcatggacaagatctatgaaggccaagtggaggtgactggtgatgaatacaatgtggaaagcattgatggtcagccaggtgccttcacctgctatttggatgcaggccttgccagaactaccactggcaataaagtttttggtgcc

SEQ ID NO: 829 - DNA, 255 bp, Homo Sapiens
gaatcgtcgacccacgcgtccgcccacgcgtccgccaaagccctggctatgaacctcggagccccgggtatgaaccccggagccctggctatgaatctgagagctctagatatgaatcccagaacactgagctcaaaacccaaagcccagaatttgaagctcaaagttccaaattccaggaaggtgcggagatgcttctgaaccccgaggaaaagagtcctttgaatatctccgtaggagttcaccccctggact

SEQ ID NO: 830 - DNA, 255 bp, Homo Sapiens
gaatcgtcgacccacgcgtccgcccacgcgtccgccaggattccctcagtaacggcgagtgaacagggaagagcccagcgccgaatccccgccccgcggcggggcgcgggacatgtggcgtacggaagacccgctccccggcgccgctcgtggggggcccaagtccttctgatcgaggcccagcccgtggacggtgtgaggccggtagcggcccccggcgcgccgggcccgggtcttcccggagtcgggttgctt

SEQ ID NO: 831 - DNA, 255 bp, Homo Sapiens; identical to SEQ ID NO: 821

SEQ ID NO: 832 - DNA, 255 bp, Homo Sapiens; identical to SEQ ID NO: 810

SEQ ID NO: 833 - DNA, 255 bp, Homo Sapiens
gaatcgtcgacccacgcgtccgcagtaggaagctggggcccacgggggccttcgggggcagatggcaggcaggcttggggacagaccccggagggcaggagccgggtccgccgcccctccgccggcgcctgcgcattgaggcccagctcccctctcaaccccgccccatcgcttgggttttcaaatttgaaacctgcttcttttcccgcccgaacgtgtggatcagcggcgggagagggcggggcagagcgccag

SEQ ID NO: 834 - DNA, 255 bp, Homo Sapiens
gaatcgtcgacccacgcgtccgtgatgattaaggactacaagaagatccccatcaagcgcgcagacatgctgaaggatgtcatcagagaatatgatgaacatttccctgagatcattgaacgagcaacgtacaccctggaaaagaagtttgggatccacctgaaggagatcgacaaggaagaacacctgtatattcttgtctgcacacgggactcctcagctcgcctccttggaaaaaccaaggacactcccagg

SEQ ID NO: 835 - DNA, 255 bp, Homo Sapiens; identical to SEQ ID NO: 707

SEQ ID NO: 836 - DNA, 255 bp, Homo Sapiens
gaatcgtcgacccacgcgtccggacagaaaaatggtttcctaggctgctgctattctgtgcagtgtcagaacatgttcgcctgtgtcccagtgacttcagcttcagctgtggctgaaagaggccaaggcacagctcagacccttgcttctaagggtgtaaaccctaagccttgcagtttcccacatggtgtttggcctgttggtgcatagaagtcaaaaatcgaggtttgagaacctccacctagatttcggagg

SEQ ID NO: 837 - DNA, 255 bp, Homo Sapiens; identical to SEQ ID NO: 684

SEQ ID NO: 838 - DNA, 255 bp, Homo Sapiens
gaatcgtcgacccacgcgtccgggggcatgcagtttggtcttctgggaactggcttccagctgtttggctatgaggaaaaactgcagtccaatcctctacagcatctctttgaagtttatgtacaagttaataaagaagcagcagatgataaaagtgtagcaaaagcagcacaggagttcttccaacgattggaactgggcgatgtgcaagcactttcactgtggcaaaaatttcgggacttgagcattgaagag

SEQ ID NO: 839 - DNA, 255 bp, Homo Sapiens
gaatcgtcgacccacgcgtccgcccacgcgtccgctagccgaagcggctgcatctggcgccgcgtctgccccgcgtgctcggagcggattctgcccgccgtccccggagccctcggcgccccgctgagcccgcgatcacttcctccctgtgaccaaccggcgctgcaggttagagcctggcaatgccgtttgggtgtgtgactctgggcgacaagaagaactataaccagccatcggaggtgactgacagatatg

SEQ ID NO: 840 - DNA, 255 bp, Homo Sapiens
gaatcgtcgacccacgcgtccgggctggtttgcgtcgacatggcggttaccctgagtctcttgctgggcgggcgcgtttgcgccgccgtcactcgctgtgggttcgcgacccggggggtggcgggcccaggccctattggccgggagccggaccccgattccgactgggagccggaggaacgggagctgcaggaggtggagaggtaccggcttctccccgggccctcagcttgaagcagggcctcgtgccccggc

SEQ ID NO: 841 - DNA, 255 bp, Homo Sapiens
gaatcgtcgacccacgcgtccggtgagttatacactacttcaatctgtaattgaattgtagactattttattgctctgaagaacatttagcaattaatgctagaactaatatgctgctcagtagtgctttagagatccactttatggcataggtgagaacatttgcagtcaccttcccctcctttgccagtttatgtaggtcctatgaactcctgagtcaagtctggccttctctggaaagtctttcctgtttca

SEQ ID NO: 842 - DNA, 255 bp, Homo Sapiens
gaatcgtcgacccacgcgtccgggcgggcggggcccgggaggtgctcacactgcagttgggacattttgccggtttcgtgggcgcgcactggtggaaccagcaggatgctgcgctgggccgagcgaccgattccaaggagcccccgggagagctgtgccccgacgtcctgtatcgtacgggccggacgctgcacggccaggagacctacacgccgcgactcatcctcatggatctgaagggtagtttgagctccc

SEQ ID NO: 843 - DNA, 255 bp, Homo Sapiens; identical to SEQ ID NO: 670

SEQ ID NO: 844 - DNA, 255 bp, Homo Sapiens
gaatcgtcgacccacgcgtccgcacacactggggagaagccgtatgtttgtggggtgtgtgggcgaggctttagtctcaagtcacacctcaacagacaccagaacatacactcaggagagaagcccattgtgtgcaaggactgtggccggggcttcagccagcaatccaacctcatcagacaccagaggacgcactcaggcgagaagcccatggtgtgtggggagtgcgggcgaggcttcagccagaagtcaaac

SEQ ID NO: 845 - DNA, 255 bp, Homo Sapiens
  misc_feature (37)..(37): n is a, c, g, or t
  misc_feature (75)..(75): n is a, c, g, or t
  misc_feature (80)..(80): n is a, c, g, or t
  misc_feature (103)..(103): n is a, c, g, or t
  misc_feature (116)..(116): n is a, c, g, or t
  misc_feature (159)..(159): n is a, c, g, or t
gaatcgtcgacccacgcgtccgcacacacgtgggganaagccgtatgtttgtggggtgtgtgggcgaggctttantctcnagtcacacctcaacagacaccanaacatacactcangagagaagcccattgtgtgcaaggactgtggccggggcttcanccagcaatccaacctcatcagacaccagaggacgcactcaggcgagaagcccatggtgtgtggggagtgcgggcgaggcttcagccagaagtcaaa

SEQ ID NO: 846 - DNA, 255 bp, Homo Sapiens
gaatcgtcgacccacgcgtccgctatgttcaatataagaaatattggaaagacgctcgtcaccaggacccaaggtaccaaaattgcatctgatggtctcaagggtcgtgtgtttgaagtgagtcttgctgatttgcagaatgatgaagttgcatttagaaaattcaagctgattactgaagatgttcagggtaaaaactgcctgactaacttccatggcatggatcttacccgtgacaaaatgtgttccatggtc

SEQ ID NO: 847 - DNA, 255 bp, Homo Sapiens
gaatcgtcgacccacgcgtccgcccacgcgtccgcatccccgaggtccccagcgaggacacacactccacgagagcagcccctccactctgcccaggagaggggccgaccctcctcgggaaccggccacccgcgtggctcccagcatccatcaggacaagcccacgtggggtcctccctgcgtgctcagagggtctgtccagccctgggaagcgaccttggcctcagttcacagcctggtgctcatctgctggca

SEQ ID NO: 848 - DNA, 255 bp, Homo Sapiens
gaatcgtcgacccacgcgtccgcccacttccgcccttttggctctctgaccagcaccatggcggttggcaagaacaagcgccttacgaaaggcggcaaaaagggagccaagaagaaagtggttgatccattttctaagaaagattggtatgatgtgaaagcacctgctatgttcaatataagaaatattggaaagacgctcgtcaccaggacccaaggaaccaaaattgcatctgatggtctcaagggtcgtgtg

SEQ ID NO: 849 - DNA, 255 bp, Homo Sapiens
gaatcgtcgacccacgcgtccgcaggggcgtgcagcccgcttgccaatcagagcgcggctgagcggccccgcagccaacccccgaggagcggccggctggcgtccgccgcgcccaggagttggggatgtcctacaaacccatcgcccctgctcccagcagcacccctggctccagcacccctgggccgggcaccccggtccctacaggaagcgtcccgtcgccgtcgggctcagtgccaggagccggcgctcctt

SEQ ID NO: 850 - DNA, 255 bp, Homo Sapiens
gaatcgtcgacccacgcgtccgcttcttcttctcggtggcggccccagcaaagacccccccgagtccacagcggcagcaaagttcccgcgctcaccgtcggccacgaagagcagcagggcatgcagcagcagaggcggcagctcccagccctcaactccttaccccagtttgggcaaccagctgccccgctgtttggcccaggcctgggccatgacggatgggtgggcgcccggggccgcgagaagggcggaacg

SEQ ID NO: 851 - DNA, 255 bp, Homo Sapiens
  misc_feature (9)..(9): n is a, c, g, or t
  misc_feature (19)..(19): n is a, c, g, or t
  misc_feature (33)..(33): n is a, c, g, or t
  misc_feature (67)..(67): n is a, c, g, or t
  misc_feature (79)..(79): n is a, c, g, or t
  misc_feature (200)..(200): n is a, c, g, or t
  misc_feature (206)..(206): n is a, c, g, or t
  misc_feature (217)..(217): n is a, c, g, or t
  misc_feature (227)..(227): n is a, c, g, or t
  misc_feature (232)..(232): n is a, c, g, or t
  misc_feature (254)..(254): n is a, c, g, or t
gaatcgtcnacccacgcgntccggagagctgcnccgcgcgggacaagtcgccggcggcgcccgacgnagcagaagaganagcatggagctggagaggatcgtcagtgcagccctccttgcctttgtccagacacacctcccggaggccgacctcagtggcttggatgaggtcatcttctcctatgtgcttggggtcctgnaggacntgggcccctcnggcccatcanagganaacttcgatatggaggctttcnc

SEQ ID NO: 852 - DNA, 255 bp, Homo Sapiens
gaatcgtcgacccacgcgtccggccactgcacctccctgatggttgggctgatccggcagggctacgcctgcgaggtgtgttcctttgcttgccacgtgtcctgcaaagacggtgccccccaggtgtgcccaatacctcccgagcagtccaagaggcctctgggcgtggacgtgcagcgaggcatcggaacagcctacaaaggccatgtcaaggtcccaaagcccacgggggtgaagaagggatggcagcgcgca

SEQ ID NO: 853 - DNA, 255 bp, Homo Sapiens
gaatcgtcgacccacgcgtccgcccacgcgtccgcggatgaagccacgcgacgtgttgtgtctgagatcccggtgctgaagactaacgccggaccccgagatcgtgagttgtgggtgcagcgactgaaggaggaatatcagtcccttattcggtatgtggagaacaacaagaatgctgacaacgattggttccgactggagtccaacaaggaaggaactcggtggtttggaaaatgctggtatatccatgacctc

SEQ ID NO: 854 - DNA, 255 bp, Homo Sapiens
gaatcgtcgacccacgcgtccgcccacgcgtccgggcgggatggaggcggcggccgagcctggaaacctggccggcgtcaggcacatcatcctggtcctctcaggaaaggggggcgttgggaaaagcaccatctccacggagctggccctggcactgcgccatgcaggcaagaaggtgggaatcctggatgtggacctgtgtggccccagtataccccgcatgctcggggcgcagggcagggctgtgcaccagtg

SEQ ID NO: 855 - DNA, 255 bp, Homo Sapiens
gaatcgtcgacccacgcgtccgggagaagcccaggccggccggaagaggagccgagcgcggccggaaggaaccgagcccgtccgaagggagcggagcgcagcctggcctggggcccggtcgagcccgcgccatggcggccgaggcgacagctgtggccggaagcggggctgttggcggctgcctggccaaagacggcttgcagcagtctaagtgcccggacactaccccaaaacggcggcgcgcctcgtcgctgt

SEQ ID NO: 856 - DNA, 255 bp, Homo Sapiens
gaatcgtcgacccacgcgtccgcgtggccccggtcgcgtctgccttggagaagaagacaaagagcaaggggccctacatctgcgctctgtgcgccaaggagttcaagaacggctacaatctccggaggcacgaagccatccacacgggagccaaggccggccgggtcccctcgggtgctatgaagatgccgaccatggtgcccctgagcctcctgagcgtgccccagctgagcggagccggcgggggagggggag

SEQ ID NO: 857 - DNA, 255 bp, Homo Sapiens
gaatcgtcgacccacgcgtccgcccacgcgtccggcgcgcacttccgggcacggtcagggcgtgacgtcgggaggagggcagacacgccgctttttggatgcctcctatgcctggcgggagtcttgtctgagctggcaccaccacacggcccacgacatcttcgcagggaagcctgtggaccctctgccaggctccacaagaggtcaggacagtgcagtgtgttcacaaggccagtttctgatcgtccgccccga

SEQ ID NO: 858 - DNA, 255 bp, Homo Sapiens
gaatcgtcgacccacgcgtccgccggaggagaacgggcggagggcgcgggccgaccgggcgcaccgaccatggcctccaaatgccccaagtgcgacaagaccgtgtacttcgccgagaaggtgagctccctggggaaggactggcacaagttctgcctcaagtgcgagcgctgcagcaagacgctgacgcccgggggccacgccgagcatgacgggaagccgttctgccacaagccgtgctacgccaccctgttc

SEQ ID NO: 859 - DNA, 255 bp, Homo Sapiens
gaatcgtcgacccacgcgtccgggagaaggtctctgaaggagaaaagcaaagaagctcttttggcctcacaaaagccatttaaatttatagcaagggaggaacagaagcgagcagcccgggaaaagcagctgagagactttcttaagtataaaaagaaaacaaatcgatttaaagccagacccattcctcgatctacttatggttcaactaccaatgacaagttaaaagaagaagagctctatcgaaaccttagg

SEQ ID NO: 860 - DNA, 255 bp, Homo Sapiens
gaatcgtcgacccacgcgtccgcagacacggaccccgcaggagatgggtgcccccatccgcacactgtcctttggccaccggacatcatgcctcccaagaaggatgttcccgtgaagaaaccagcagggccctccatctccaaacctgctgctaagccagcagcagcaggggctcctccagccaagaccaaagctgagccagctgtcccccaggcccctcagaaaacccaggagcctccagtcgatctctccaaa

SEQ ID NO: 861 - DNA, 255 bp, Homo Sapiens
gaatcgtcgacccacgcgtccgccagcactgagttctgcccgggagaagccgacccctcccgcaatgcccgccccgccgtgcgcctcctgccatgctgcacgcgccgccctccgccgtccgctctcgggccaagcgctgtgcggtgcctgcttctgcgccgccttcgaggccgaggtgctgcacacggtgctcgccggccgcctgctgccgcccggcgcggtggtggccgtgggcgcctcgggcggcaaggactc

SEQ ID NO: 862 - DNA, 255 bp, Homo Sapiens
gaatcgtcgacccacgcgtccgctcgtcgtgaagacacagcgcatctccccgctgtaggcttcctcccacagaacccgtttcgggcctcagagcgtctggtgagatgctgttgccgctgctgctgctgctacccatgtgctgggccgtggaggtcaagaggccccggggcgtctccctcaccaatcatcacttctacgatgagtccaagcctttcacctgtctggacggttcggccaccatcccatttgatcagg

SEQ ID NO: 863 - DNA, 255 bp, Homo Sapiens
gaatcgtcgacccacgcgtccgaagaaaaccagcgcaaggaatcctctagttttaagactgaagatggaaaaagtattttatctgccttagacaaaggctctacacatactgcatgctcaggacccatagatgaactattagacatgaaatctgaggaaggtgcttgcctgggaccagtggcagggaccccggaacctgaaggtgctgacaaagatgacctgctgctgttgagtgagatcttcaatgcttcctcc

SEQ ID NO: 864 - DNA, 255 bp, Homo Sapiens
gaatcgtcgacccacgcgtccgacgcactctgcaacaaagccttccgggacacctttcgcctgctgctgctttgccgctgggacaagagacgctggcgcaagatccccaagcgccctggctccgtgcaccgcactccctcccgccaatgctgatagtcccctctcctgcatccctccaccccagtccccgggaaaggccggtgggaagagggcaggggctgcatcctcagccccagggccctgctcaggcctcac

SEQ ID NO: 865 - DNA, 255 bp, Homo Sapiens
gaatcgtcgacccacgcgtccgccgggccgtaccggggaggggccgctccgggccgcagcgcgagggcagcgaggggcggcggggacctggcaccgggcggggccggcggcagcgaccatgatcgctttgttcaacaagctgctggactggttcaaggccctattctggaaggaggagatggagctcacgctggtcgggcttcagtactcgggcaagaccaccttcgtcaacgtgatcgcgtcaggacagttcaa

SEQ ID NO: 866 - DNA, 255 bp, Homo Sapiens
gaatcgtcgacccacgcgtccgtgcaggctgtgagaaacgcggggtcgcggttcctgcggtcctggacttggccccagacagccggcagggtcgtggccagaacgccggccgggaccatctgcacaggcgctcgacagctccaagacgctgcggccaagcagaaagttgaacagaacgcggctcccagccacaccaagttcagcatttaccctcccattccaggagaggagagctctctgaggtgggcaggaaag

SEQ ID NO: 867 - DNA, 255 bp, Homo Sapiens
gaatcgtcgacccacgcgtccgcggacgcgtgggctgcgagaatgaagactattctcagcaatcagactgtcgacattccagaaaatgtcgacattactctgaagggacgcacagttatcgtgaagggccccagaggaaccctgcggagggacttcaatcacatcaatgtagaactcagccttcttggaaagaaaaaaaagaggctccgggttgacaaatggtggggtaacagaaaggaactggctaccgttcgg

SEQ ID NO: 868 - DNA, 255 bp, Homo Sapiens
gaatcgtcacccggcggcctctcattctgcagctcatcttctcaaaaacagaacatgccgagtttttgcactgcaagtccaaaaagtttacagactttgatgaagtccggcaggagattgaagcagagaccgacagggtcacggggaccaacaaaggcatctccccagtgcccatcaaccttcgagtctactcgccacacgtgttgaacttgaccctcatcgacctcccgggtatcaccaaggtgcctgtgggcg

SEQ ID NO: 869 - DNA, 255 bp, Homo Sapiens
gaatcgtcgacccacgcgtccgctcggaccgcgcctctccagcgccgccgcgcccgcagcggggcgccccggacagggcctgagctcccggcgcagtggagaggcgacttgcgtcctggaagggctcagcaaaggcgaacggagaggtgcaccctaggctgcgggagcgcgagaggaggggggcacctcgtttggaggccaatagcgcgggccccagaggaggccccacggccgggagcttggcggccggcagcc

SEQ ID NO: 870 - DNA, 255 bp, Homo Sapiens
gaatcgtcgacccacgcgtccggctccttgcacagcagctgcacgcgccgtggctccggatctcttcgtctttgcagcgtagcccgagtcggtcagcgccggaggacctcagcagccatgtcgaagccccatagtgaagccgggactgccttcattcagacccagcagctgcacgcagccatggctgacacattcctggagcacatgtgccgcctggacattgattcaccacccatcacagcccggaacactggc

SEQ ID NO: 871 - DNA, 255 bp, Homo Sapiens
gaatcgtcgacccacgcgtccggcgggcagggtgctgacggctgggccacacgctgtctcattgtctctgcagtccgctgcccggcccggaagcggaggaactcacgggatggggacccgctgccctccagcctcagctgcaaggtgcacgtggcatcggtgaacaacttccccacggctgcgggcctggcctcctcagcggcgggctatgcctgcctaggtaccttttgttgcccttgtcgcaggccgcaacct

SEQ ID NO: 872 - DNA, 255 bp, Homo Sapiens
gaatcgtcgacccacgcgtccggcacgcgccgtggctccggatctcttcgtctttgcagcgtagcccgagtcggtcagcgccggaggacctcagcagccatgtcgaagccccatagtgaagccgggactgccttcattcagacccagcagctgcacgcagccatggctgacacattcctggagcacatgtgccgcctggacattgattcaccacccatcacagcccggaacactggcatcatctgtaccattggc

SEQ ID NO: 873 - DNA, 255 bp, Homo Sapiens
gaatcgtcgacccacgcgtccgcccacgcgtccgggagcacctgcacctggagtctacccagggccacccagcggccctggggcctacccatcttctggacagccaagtgccaccggagcctaccctgccactggcccctatggcgcccctgctgggccactgattgtgccttataacctgcctttgcctgggggagtggtgcctcgcatgctgataacaattctgggcacggtgaagcccaatgcaaacagaat

SEQ ID NO: 874 - DNA, 255 bp, Homo Sapiens
  misc_feature (230)..(230): n is a, c, g, or t
gaatcgtcgacccacgcgtccgcgggactcttggcgggtgaaggtgtgtgtcagcttttgcgtcactcgagccctgggcgctgcttgctaaagagccgagcacgcgggtctgtcatcatgtcgcgttacgggcggtacggaggagaaaccaaggtgtatgttggtaacctgggaactggcgctggcaaaggagagttagaaagggctttcagttattatggtcctttaanaactgtatggattgcgagaaatcct

SEQ ID NO: 875 - DNA, 255 bp, Homo Sapiens
gaatcgtcgacccacgcgtccgcccacgcgtccgctgaagaagaaattcaggaaatctgcttaaagatcttgcagctttatgctcggaaaaaggttgatctcacacacctggagggtgaagtggaaaaaagaaagcacgctatcgaagaggcaaaggcccaagcccggggcctgttgcctgggggcacacaggtgctggatggtacctcggggttctctcctgcccccaagctggtggaatcccccaaagaaggt

SEQ ID NO: 876 - DNA, 255 bp, Homo Sapiens
gaatcgtcgacccacgcgtccgcccacgcgtccgaaagttacaaatgtgaagagtgtggcaaagcctttggatggtccatagccctgaatcaacacaagaaaattcatactggagaaaaaccttacaaatgtgaagagtgtggcaaagcctttagtaggtcaagaaaccttactacacataggagagttcacactagggagaaaccctacaaatgtgaagatcgtggcagatcctttggatggtccacaaacctg

SEQ ID NO: 877 - DNA, 255 bp, Homo Sapiens
gaatcgtcgacccacgcgtccggggtgtttgagggcccctataaggagtaccatgaggaagcccagaagtgggaccgctacactgaccctgtacccagccctcggcctggctcgtgcattaacaactggcatcggcgccacggctacaccagctccctggagctacccgacaacatcctcaacttcgtcaagaagcacccgctgatggaggagcaggtggggcctcggtggagccgccccctgctcgtgaagaag

SEQ ID NO: 878 - DNA, 255 bp, Homo Sapiens
gaatcgtcgacccacgcgtccgccagaatgcttcagaagaatggattacctttactgagcaaagtcaactagaggcggacaaggctatagaagttttgctcacagcacctacagggaaagcagctggcttactaagacagaaaactggtcttcatgcctacacactgtgtcaggtcaattatagcttctattcatggactcaaacaatgatgaccacaaacaaaccatggaaattttcttcggttagagttctgg

SEQ ID NO: 879 - DNA, 255 bp, Homo Sapiens
gaatcgtcgacccacgcgtccgagcgcacccacactggcgagcggccctacaaatgtccccgttgcggcaaggccttcgccgacagctcttacctgcttcgccaccagcgcactcactctggccagaagccctacaagtgcccacattgtggcaaggccttcggcgacagctcctacctcctgcgacaccagcgcacccacagccacgagcggccctacagctgcaccgagtgcggcaagtgctatagccagaac

SEQ ID NO: 880 - DNA, 255 bp, Homo Sapiens
gaatcgtcgacccacgcgtccgggcagcgcgctgctggctctgtgcggggcactggctgcctgcgggtggctcctgggcgccgaagcccaggagcccggggcgcccgcggcgggcatgaggcggcgccggcggctgcagcaagaggacggcatctccttcgagtaccaccgctaccccgagctgcgcgaggcgctcgtgtccgtgtggctgcagtgcaccgccatcagcaggatttacacggtggggcgcagctt

SEQ ID NO: 881 - DNA, 255 bp, Homo Sapiens
gaatcgtcgacccacgcgtccgggtgtgttcaccggatcagagatagcagagcgccgagttggggccacgaaggcgtgaggggagtcgtcgtccctcctgcacgaaagcgtctaagccttggcgacgccgccctgggggacccacgtcaggcctgggatagggaccgctgtccccgggtccctaccaatgtcgcccgtcgctcccggcccagctctacccgcagagtctgatggcagcggccactctgaggacgc

SEQ ID NO: 882 - DNA, 255 bp, Homo Sapiens
gaatcgtcgacccacgcgtccgggccttcgggcagagctcggcgctgctgcagcaccagcgcacacacacggccgagcgcccctaccgctgcccccactgcggcaaagccttcgggcagagctccaacttgcaacaccacctgcgcatccacacgggcgagcggccctacgcctgcccgcactgctccaaggccttcggccagagctcagcgctgctccagcacctgcacgtgcattcgggcgagcgtccctatc

SEQ ID NO: 883 - DNA, 255 bp, Homo Sapiens
gaatcgtcgacccacgcgtccgcccacgcgtccgctccagaccacagaaggggagtcctggggacaggactggtgtagacaggcatctccaccgccccggttagccagtacctaacacccactcctgccctcggccgatgtggcaaaccggggaggcttttgtgtggggccggggctgcggccatggcagccaccctccagctcccgggggctggggaagacgctggggtccccgtggaggctggagcggcgttc

SEQ ID NO: 884 - DNA, 255 bp, Homo Sapiens
gaatcgtcgacccacgcgtccgcctggggctcagagtgttgtactcgtaaaacaaggatcatcgatgttgtctacaatgcatctaataacgagctggttcgtaccaagaccctggtgaagaattgcatcgtgctcatcgacagcacaccgtaccgacagtggtacgagtcccactatgcgctgcccctgggccgcaagaagggagccaagctgactcctgaggaagaagagattttaaacaaaaaacgatctaaa

SEQ ID NO: 885 - DNA, 255 bp, Homo Sapiens
  misc_feature (19)..(19): n is a, c, g, or t
  misc_feature (24)..(24): n is a, c, g, or t
gaatcgtcgacccacgcgntccgntggagagtgtcatggaggcctacgagcaggtccaaaagggacccctgaagctgaaaggcgtcgcagagctgggagtgaccaagcggaagaagaaaaagaaggacaaagacaaagcgaaactcctggaagcaatgggaacgagcaaaaagaacgaggaggagaagcggcgcggcctggacaagcggaccccggcccaggcggccttcgagaaaatgcaggagaagcggcaaa

SEQ ID NO: 886 - DNA, 255 bp, Homo Sapiens
gaatcgtcgacccacgcgtccgcccacgcgtccgccatcctgagctccatggagaagccacccagcctcggtgaccaggagactcggcgcaaggcccgagaacaggccgcccgcctgaagaaactacaagagcaagagaaacaacagaaagtggagtttcgtaaaaggatggagaaggaggtgtcagatttcattcaagacagtgggcagatcaagaaaaagtttcagccaatgaacaagatcgagaggagcata

SEQ ID NO: 887 - DNA, 255 bp, Homo Sapiens
gaatcgtcgacccacgcgtccgcccacgcgtccggcatgcatgctcccgggaagggcctgtcccagtcggctttaccctatcgacgcagcgtccccacttggttgaagttgacatctgacgacgtgaaggagcagatttacaaactggccaagaagggccttactccttcacagatcggtgtaatcctgagagattcacatggtgttgcacaagtacgttttgtgacaggcaataaaattttaagaattcttaag

SEQ ID NO: 888 - DNA, 255 bp, Homo Sapiens
gaatcgtcgacccacgcgtccgggctcatccaaaatagaggaagcatgcgaaatctacgccagagcagcaaacatgttcaaaatggccaaaaactggagtgctgctggaaacgcgttctgccaggctgcacagctgcacctgcagctccagagcaagcacgacgcagccacctgctttgtggacgctggcaacgcattcaagaaagccgacccccaagaggccattaactgtttgatgcgagcaatcgagatcta

SEQ ID NO: 889 - DNA, 255 bp, Homo Sapiens
  misc_feature (67)..(67): n is a, c, g, or t
  misc_feature (71)..(71): n is a, c, g, or t
  misc_feature (99)..(99): n is a, c, g, or t
  misc_feature (132)..(132): n is a, c, g, or t
  misc_feature (212)..(212): n is a, c, g, or t
gaatcgtcgacccacgcgtccggtcggggaaaccagcacgatgtgccagtcattcctttggatgtanctancataatcagacagagaagttggacaccnacataactgaggtggatgcagcctccgtttacncgctgcctgctggagctgacttcctcatgtgttactctgttgcagaaggatattattctcaccgggaaactgtgaacggntcatggtacattcaagatttgtgtgagatgttgggaaaatatg

SEQ ID NO: 890 - DNA, 255 bp, Homo Sapiens
  misc_feature (255)..(255): n is a, c, g, or t
gaatcgtcgacccacgcgttccgcccacgcgtccggacgcgacggcgggccgcgcggcgcatttccgcctctggcgaatggctcgtctgtagtgcacgccgcgggcccagctgcgaccccggccccgcccccgggaccccggccatggacgaactgttccccctcatcttcccggcagagccagcccaggcctctggcccctatgtggagatcattgagcagcccaagcagcggggcatgcgcttccgctacaan

SEQ ID NO: 891 - DNA, 255 bp, Homo Sapiens
gaatcgtcgacccacgcgtccggcaagcagttccaccaccagctgcgcgtgggcgagcgacagcccctgctgggtccccctgagtccatgcgggaacatgtggtcgctgcctccaaggccatgaagatgggtgactggaagacctgtcacagttttatcatcaatgagaagatgaatgggaaagtgtgggaccttttccccgaggctgacaaagtccgcaccatgctggttaggaagatccaggaagagtcactg

SEQ ID NO: 892 - DNA, 255 bp, Homo Sapiens
gaatcgtcgacccacgcgtccggcaaagcccaagctagaactcactgtctatggcagaaggacatccagagcccattctggagttttgttttttccttctgccagatgctttgtgtcctgtcttccttcctcctcatatttctgtttctcatttgtgttcagttttgtgcagcattgctagcactgcttttgtgaccagaaaaggccataacatggtccaggatcatcattcttctgactctagatgggacactt

SEQ ID NO: 893 - DNA, 255 bp, Homo Sapiens
gaatcgtcgacccacgcgtccgcccacgcgtccgccctgccctgcccatccctcctgcaccagcgctgtccctgcacactttggttcagtcccggtgcccctgccaagatgtggaaggggccgggtgaagacaggcttgagggctgccccagcaggctctgggtatgacctgcctctggccctggtcctgggcggggcctgtgggtggagtagtacccccaggccctgccctgggtgacagactgggaggaaacc

SEQ ID NO: 894 - DNA, 255 bp, Homo Sapiens
  misc_feature (254)..(254): n is a, c, g, or t
gaatcgtcgacccacgcgtccgcccacgcgatccggcgtggtggaggcatgtgccatgcccagatggttcactgtccaggcgggtaagggctcctgcagggcctgggggcatccacatggccaggtgccctgggggtgtggggtgtgggaggaggccggggtcagggggctcgggcaggcctgctgtcctccctggacgcctcactgtgctcagcagctctgagccaggcattgcgctcctctgtggcctccana

SEQ ID NO: 895 - DNA, 255 bp, Homo Sapiens
gaatcgtcgacccacgcgtccgcccacgcgtccggtctccctgccttctggctttctccctcttccctagaaggccggactcaaaaggagaagaaagctgctcgtgctcgttccaaagggaaaaactcggatgaagaagcccccaagactgcccagaagaagttaaagctcgtgcgcacaagtcctgagtatgggatgccctcagtgacctttggcagtgtccacccctctgatgtgttggatatgcctgtggat

SEQ ID NO: 896 - DNA, 255 bp, Homo Sapiens
gaatcgtcgacccacgcgtccggcgcggggcccgcccctgggaccctccgggccgggcggtttggccccttagcgcccgggcgtcggggcggtaaaaggccggcagaagggaggcacttgagaaatgtctttcctccaggacccaagtttcttcaccatggggatgtggtccattggtgcaggagccctgggggctgctgccttggcattgctgcttgccaacacagacgtgtttctgtccaagccccagaaagc

SEQ ID NO: 897 - DNA, 255 bp, Homo Sapiens
gaatcgtcgacccacgcgtccgagcggatcgcgggctcgggctgcggggctccggctgcgggcgctgggccgcgaggcgcggagcttgggagcggagcccaggccgtgccgcgcggcgccatgaagggcaaggaggagaaggagggcggcgcacggctgggcgctggcggcggaagccccgagaagagcccgagcgcgcaggagctcaaggagcagggcaatcgtctgttcgtgggccgaaagtacccggaggcg

SEQ ID NO: 898 - DNA, 255 bp, Homo Sapiens
gaatcgtcgacccacgcgtccgcggacgcgtgggggggtaacaagatggcgaccgagacggtggagctccataagctaaagcttgccgaactaaagcaagaatgtcttgctcgtggtttggagaccaagggaataaagcaagatcttatccacagactccaggcatatcttgaagaacatgctgaagaggaggcaaatgaagaagatgtactgggagatgaaacagaggaagaagaaacaaagcccattgagctc

SEQ ID NO: 899 - DNA, 255 bp, Homo Sapiens
gaatcgtcgacccacgcgtccgggaccaggcagccactttcctggtgctctctgggcccagctggtgctgtagggccacgcaggcaggggcgtcaaggggtttctctgcccaaggaagacagaacatggagaaccgtcagggcaggaaccccacagactgtcccttccagcccacactctgccacctcctggccctgtcccaattctgagccaaggcctccccgaggcagaagttgcctggtcctctgtccccac

SEQ ID NO: 900 - DNA, 255 bp, Homo Sapiens
gaatcgtcgacccacgcgtccgcggacgcgtgggcgccgttcagtcgccaatatgcagctctttgtccgcgcccaggagctacacaccttcgaggtgaccggccaggaaacggtcgcccagatcaaggctcatgtagcctcactggagggcattgccccggaagatcaagtcgtgctcctggcaggcgcgcccctggaggatgaggccactctgggccagtgcggggtggaggccctgactaccctggaagtagc

SEQ ID NO: 901 - DNA, 255 bp, Homo Sapiens
gaatcgtcgacccacgcgtccgccaccgccgaggaaaaccgtgtactattagccatggtcaaccccaccgtgttcttcgacattgccgtcgacggcgagcccttgggccgcgtctcctttgagctgtttgcagacaaggtcccaaagacagcagaaaattttcgtgctctgagcactggagagaaaggatttggttataagggttcctgctttcacagaattattccagggtttatgtgtcagggtggtgacttc

SEQ ID NO: 902 - DNA, 255 bp, Homo Sapiens
gaatcgtcgacccacgcgtccggcttcgtggaggttggccgggtggcctatgtctcctttggacctcatgccggaaaattggtcgcgattgtagatgttattgatcagaacagggctttggtcgatggaccttgcactcaagtgaggagacaggccatgcctttcaagtgcatgcagctcactgatttcatcctcaagtttccgcacagtgcccaccagaagtatgtccgacaagcctggcagaaggcagacatc

SEQ ID NO: 903 - DNA, 255 bp, Homo Sapiens
gaatcgtcgacccacgcgtccgctaaaaagaagcgggagaatctgggcgtcgctctagagatcgatgggctagaggagaagctgtcccagtgtcggagagacctggaggccgtgaactccagactccacagccgggagctgagcccagaggccaggaggtccctggagaaggagaaaaacagcctaatgaacaaagcctccaactacgagaaggaactgaagtttcttcggcaagagaaccggaagaacatgctg

SEQ ID NO: 904 - DNA, 255 bp, Homo Sapiens
gaatcgtcgacccacgcgtccgcccacgcgtccggtggctccttgcacagcagctgcacgcgccgtggctccggatctcttcgtctttgcagcgtagcccgagtcggtcagcgccggaggacctcagcagccatgtcgaagccccatagtgaagccgggactgccttcattcagacccagcagctgcacgcagccatggctgacacattcctggagcacatgtgccgcctggacattgattcaccacccatcaca

SEQ ID NO: 905 - DNA, 255 bp, Homo Sapiens
gaatcgtcgacccacgcgtccgcccggcgatatggctgccgctgtgccccgcgccgcatttctctccccgctgcttccccttctcctgggcttcctgctcctctccgctccgcatggcggcagcggcctgcacaccaagggcgcccttcccctggatacggtcactttctacaaggtcattcccaaaagcaagttcgtcttggtgaagttcgacacccagtacccctacggtgagaagcaggatgagttcaagcg

SEQ ID NO: 906 - DNA, 255 bp, Homo Sapiens
gaatcgtcgacccacgcgtccgcccacgcgtccggggtgcgcacgctctgtccctgcgtgaccttccgaccccgctgtcctcaccgcaatggcggctgtgagggccctggtggcctcgaggctcgctgcggcatctgcattcacgtccctgtcccccggcggtcggacgccttcccagcgcgcagcccttcacctctccgtgccgcgccccgcggccagggtcgcgctggtgctgtctggatgcggagtctacga

SEQ ID NO: 907 - DNA, 255 bp, Homo Sapiens
gaatcgtcgacccacgcgtccggccaccccctggcgagcggagccacacccagcgccttgcagtctaaggagagcccatgcctttggacatgctgttccttctgcctggaatttccttgtccgcctggtgaactcctcgttctgcaagactccgctcaaaacagcaccttcgagaagactgccctgccccttccctgccttgccccatgtccccctcccttgggtccccagagccacgcacatccagccctgctt

SEQ ID NO: 908 - DNA, 255 bp, Homo Sapiens
gaatcgtcgacccacgcgtccgggtagactcaaagaggtgtgaggtcagagcagacatttgagggggcagcatccctttgggacctcggcccctgctcccctttacccactggtggaggcgggaggttgggtgagagttgggtgtatgttttctgccctgtccacctgtgcaccaggccagggacaccttcaacaatgcctgctgtgccagtgtttgtgtgggtcactgaccctgtgtaccagactcacttggta

SEQ ID NO: 909 - DNA, 255 bp, Homo Sapiens
  misc_feature (9)..(9): n is a, c, g, or t
  misc_feature (53)..(53): n is a, c, g, or t
  misc_feature (65)..(65): n is a, c, g, or t
  misc_feature (68)..(68): n is a, c, g, or t
  misc_feature (73)..(73): n is a, c, g, or t
  misc_feature (105)..(105): n is a, c, g, or t
  misc_feature (118)..(118): n is a, c, g, or t
  misc_feature (120)..(120): n is a, c, g, or t
  misc_feature (122)..(122): n is a, c, g, or t
  misc_feature (133)..(135): n is a, c, g, or t
  misc_feature (143)..(144): n is a, c, g, or t
  misc_feature (147)..(148): n is a, c, g, or t
  misc_feature (154)..(154): n is a, c, g, or t
  misc_feature (156)..(156): n is a, c, g, or t
  misc_feature (158)..(159): n is a, c, g, or t
  misc_feature (162)..(163): n is a, c, g, or t
  misc_feature (169)..(171): n is a, c, g, or t
  misc_feature (174)..(175): n is a, c, g, or t
  misc_feature (178)..(185): n is a, c, g, or t
  misc_feature (189)..(190): n is a, c, g, or t
  misc_feature (194)..(194): n is a, c, g, or t
  misc_feature (197)..(197): n is a, c, g, or t
  misc_feature (199)..(201): n is a, c, g, or t
  misc_feature (206)..(207): n is a, c, g, or t
  misc_feature (212)..(212): n is a, c, g, or t
  misc_feature (214)..(214): n is a, c, g, or t
  misc_feature (222)..(222): n is a, c, g, or t
  misc_feature (226)..(230): n is a, c, g, or t
  misc_feature (232)..(233): n is a, c, g, or t
  misc_feature (235)..(235): n is a, c, g, or t
  misc_feature (237)..(238): n is a, c, g, or t
  misc_feature (243)..(243): n is a, c, g, or t
  misc_feature (245)..(245): n is a, c, g, or t
  misc_feature (253)..(253): n is a, c, g, or t
gaatcgtcnacccacgtcgtccgccctgggcctgggcctcaacatcggccgcngctttccggcgntcnatggntcgccgtggccgccggggccaacccaagccanccgccgcttccgncnancatcctggaannnaacgcgannctnngccggnantnntannaaggcnnnagnngcnnnnnnnnccgnngacnctnannnttagnngatananggatgatncacnnnnntnnangnnattgncnaacccgancc

SEQ ID NO: 910 - DNA, 255 bp, Homo Sapiens
  misc_feature (105)..(105): n is a, c, g, or t
  misc_feature (112)..(112): n is a, c, g, or t
  misc_feature (114)..(114): n is a, c, g, or t
  misc_feature (116)..(117): n is a, c, g, or t
  misc_feature (121)..(121): n is a, c, g, or t
  misc_feature (133)..(133): n is a, c, g, or t
  misc_feature (141)..(141): n is a, c, g, or t
  misc_feature (144)..(144): n is a, c, g, or t
  misc_feature (151)..(151): n is a, c, g, or t
  misc_feature (155)..(155): n is a, c, g, or t
  misc_feature (157)..(157): n is a, c, g, or t
  misc_feature (164)..(164): n is a, c, g, or t
  misc_feature (171)..(171): n is a, c, g, or t
  misc_feature (173)..(173): n is a, c, g, or t
  misc_feature (181)..(181): n is a, c, g, or t
  misc_feature (183)..(183): n is a, c, g, or t
  misc_feature (189)..(189): n is a, c, g, or t
  misc_feature (193)..(193): n is a, c, g, or t
  misc_feature (195)..(195): n is a, c, g, or t
  misc_feature (199)..(199): n is a, c, g, or t
  misc_feature (204)..(204): n is a, c, g, or t
  misc_feature (209)..(209): n is a, c, g, or t
  misc_feature (216)..(217): n is a, c, g, or t
  misc_feature (223)..(223): n is a, c, g, or t
  misc_feature (243)..(243): n is a, c, g, or t
  misc_feature (247)..(248): n is a, c, g, or t
  misc_feature (250)..(250): n is a, c, g, or t
gaatcgtcgacccacgcgtccggcggctgtcgccatgttgtcggtagcagcccgctcgggcccgttcgcgcccgtcctgtcggccacgtcccgcggggtggcggncgccctncngnncttnatgaaggccaangggcccanaanaccggancaancnctccagnggacgantntcaactancnctttgngaancncctnaacgncaaanaccatannaagaanacagatatgattgcacgacncaanntngtcca

SEQ ID NO: 911 - DNA, 129 bp, Homo Sapiens
gaatcgtcgacccacgcgtccgaccggcttggcggttggagcggctgtcgccatgttgtcggtagcagcccgctcgggcccgttcgcgcccgtcctgtcggccacgtcccgcggggtggcgggcgcgct

SEQ ID NO: 912 - DNA, 255 bp, Homo Sapiens
  misc_feature (96)..(96): n is a, c, g, or t
  misc_feature (111)..(111): n is a, c, g, or t
  misc_feature (117)..(117): n is a, c, g, or t
  misc_feature (134)..(134): n is a, c, g, or t
  misc_feature (138)..(138): n is a, c, g, or t
  misc_feature (141)..(141): n is a, c, g, or t
  misc_feature (143)..(143): n is a, c, g, or t
  misc_feature (150)..(150): n is a, c, g, or t
  misc_feature (158)..(160): n is a, c, g, or t
  misc_feature (176)..(176): n is a, c, g, or t
  misc_feature (181)..(182): n is a, c, g, or t
  misc_feature (185)..(185): n is a, c, g, or t
  misc_feature (189)..(190): n is a, c, g, or t
  misc_feature (196)..(196): n is a, c, g, or t
  misc_feature (206)..(206): n is a, c, g, or t
  misc_feature (212)..(212): n is a, c, g, or t
  misc_feature (217)..(217): n is a, c, g, or t
  misc_feature (222)..(222): n is a, c, g, or t
  misc_feature (227)..(229): n is a, c, g, or t
  misc_feature (231)..(231): n is a, c, g, or t
  misc_feature (237)..(237): n is a, c, g, or t
  misc_feature (246)..(246): n is a, c, g, or t
  misc_feature (248)..(248): n is a, c, g, or t
  misc_feature (251)..(251): n is a, c, g, or t
  misc_feature (253)..(253): n is a, c, g, or t
  misc_feature (255)..(255): n is a, c, g, or t
gaatcgtcgacccacgcgtccggtcgccatgttgtcggtagcagcccgctcgggcccgttcgcgcccgtcctgtcggccacgtcccgcggggtggngggcgcgctgcggcncttggngcaggccacggtgcccncaancangngggatgnggaagttnnnttattgataacaatcnttatnntanattnnatttancaactaattnaggaanaatgntgcanaattnnnangaatanatgacccantntangntn

SEQ ID NO: 913 - DNA, 255 bp, Homo Sapiens
gaatcgtcgactggacagttaaccgattcagtgccagatttcgcagtatctacaaggtccggctacctctgccgccacattaacaaaaaacctcgggcttccagcctgcgcgacagcaaacataagaaggggtgtttttatgtcatccgatattaagatcaaagtgcaaagctttggtcgtttcctcagcaacatggtgatgccaaatatcggcgcgtttatcgcgtggggtatcatcaccgcgttatttattcc

SEQ ID NO: 914 - DNA, 255 bp, Homo Sapiens
  misc_feature (17)..(17): n is a, c, g, or t
  misc_feature (36)..(36): n is a, c, g, or t
  misc_feature (72)..(72): n is a, c, g, or t
attagagagaattactntgagaggatcgcatccccntcatccatcacggatcctatttaggtgacactatanaatcgtcgacccacgcgtccggtaagatcccctgcaactggaagaagcaatttggcgcggagtgcaaataccagttccaggcctggggagaatgtgacctgaacacagccctgaagaccagaactggaagtctgaagcgagccctgcacaatgccgaatgccagaagactgtcaccatctcca

SEQ ID NO: 915 - DNA, 764 bp, Homo Sapiens
accatcaccatcacggatcctatttaggtgacactatagaatcgtcgacccacgcgtccgccgggggcggagcgggatcgagccctcgccgaggcctgccgccatgggcccgcgccgccgccgccgcctgtcacccgggccgcgcgggccgtgagcgtcatggccttggccggggcccctgcgggcggcccatgcgcgccggcgctggaggccctgctcggggccggcgcgctgcggctgctcgactcctcgcagatcctcatcatctccgccgcgcaggacgccagcgccccgccggctcccaccggccccgcggcgcccgccgccggcccctgcgaccctgacctgctgctcttcgccacaccgcaggcgccccggcccacacccagtgcgccgcggcccgcgctcggccgcccgccggtgaagcggaggctggacctggaaactgaccatcagtacctggccgagagcagtgggccagctcggggcagaggccgccatccaggaaaaggtgtgaaatccccgggggagaagtcacgctatgagacctcactgaatctgaccaccaagcgcttcctggagctgctgagccactcggctgacggtgtcgtcgacctgaactgggctgccgaggtgctgaaggtgcagaagcggcgcatctatgacatcaccaacgtccttgagggcatccagctcattgccaagaagtccaagaaccacatccagtggctgggcagccacaccacagtgggcgtcggcggacg

SEQ ID NO: 916 - DNA, 255 bp, Homo Sapiens
  misc_feature (3)..(4): n is a, c, g, or t
  misc_feature (13)..(13): n is a, c, g, or t
  misc_feature (19)..(19): n is a, c, g, or t
  misc_feature (25)..(25): n is a, c, g, or t
  misc_feature (38)..(38): n is a, c, g, or t
  misc_feature (44)..(44): n is a, c, g, or t
  misc_feature (49)..(50): n is a, c, g, or t
  misc_feature (58)..(58): n is a, c, g, or t
  misc_feature (62)..(63): n is a, c, g, or t
  misc_feature (68)..(68): n is a, c, g, or t
  misc_feature (73)..(74): n is a, c, g, or t
  misc_feature (84)..(84): n is a, c, g, or t
  misc_feature (86)..(86): n is a, c, g, or t
  misc_feature (92)..(92): n is a, c, g, or t
  misc_feature (249)..(249): n is a, c, g, or t
tanngaaaataantatganaggatngtatcaccatcancatcanggatnntatttatntgannctatnaaatnntcgacccacncntccggngagtcgggccgcgactgtggtcgtttttataccttcccgcgcggacgccggcgctgccaacggaagggcggagacggagtttcgtcatgttggccaggcccatttgagatctttgaagatatcctcaacgtgaggctctgctgccatgaaggtgaanattaat

SEQ ID NO: 917 - DNA, 255 bp, Homo Sapiens
  misc_feature (4)..(4): n is a, c, g, or t
  misc_feature (13)..(13): n is a, c, g, or t
  misc_feature (37)..(37): n is a, c, g, or t
  misc_feature (49)..(49): n is a, c, g, or t
  misc_feature (69)..(69): n is a, c, g, or t
atanagaaattantatgagaggatcgcatcaccctcnccatcacggatnctattttggtgacactatanaatcgtcgaaccacgcggtccggcctctacacaagtatcccgtgtggctctggaagcggctgcagctgcgggagggcatctgttcccgcctgcccggccactacctgcgctccctggaggaggagcggacgcccactcccgtgcactataggcctcatggggccaagttcaagatcaaccccaaga

SEQ ID NO: 918 - DNA, 853 bp, Homo Sapiens; identical to SEQ ID NO: 228

SEQ ID NO: 919 - DNA, 470 bp, Homo Sapiens; identical to SEQ ID NO: 110

SEQ ID NO: 920 - DNA, 700 bp, Homo Sapiens
  misc_feature (2)..(2): n is a, c, g, or t
  misc_feature (4)..(4): n is a, c, g, or t
  misc_feature (81)..(81): n is a, c, g, or t
  misc_feature (114)..(114): n is a, c, g, or t
  misc_feature (122)..(122): n is a, c, g, or t
  misc_feature (202)..(202): n is a, c, g, or t
  misc_feature (215)..(215): n is a, c, g, or t
  misc_feature (281)..(281): n is a, c, g, or t
  misc_feature (305)..(305): n is a, c, g, or t
  misc_feature (332)..(332): n is a, c, g, or t
  misc_feature (335)..(335): n is a, c, g, or t
  misc_feature (367)..(367): n is a, c, g, or t
  misc_feature (372)..(372): n is a, c, g, or t
  misc_feature (428)..(428): n is a, c, g, or t
  misc_feature (436)..(436): n is a, c, g, or t
  misc_feature (438)..(438): n is a, c, g, or t
  misc_feature (486)..(486): n is a, c, g, or t
  misc_feature (507)..(507): n is a, c, g, or t
  misc_feature (516)..(516): n is a, c, g, or t
  misc_feature (519)..(519): n is a, c, g, or t
  misc_feature (529)..(529): n is a, c, g, or t
  misc_feature (534)..(534): n is a, c, g, or t
  misc_feature (543)..(543): n is a, c, g, or t
  misc_feature (545)..(545): n is a, c, g, or t
  misc_feature (551)..(551): n is a, c, g, or t
  misc_feature (560)..(560): n is a, c, g, or t
  misc_feature (568)..(568): n is a, c, g, or t
  misc_feature (585)..(585): n is a, c, g, or t
  misc_feature (589)..(589): n is a, c, g, or t
  misc_feature (592)..(592): n is a, c, g, or t
  misc_feature (596)..(596): n is a, c, g, or t
  misc_feature (599)..(599): n is a, c, g, or t
  misc_feature (602)..(602): n is a, c, g, or t
  misc_feature (609)..(609): n is a, c, g, or t
  misc_feature (617)..(617): n is a, c, g, or t
  misc_feature (623)..(623): n is a, c, g, or t
  misc_feature (636)..(636): n is a, c, g, or t
  misc_feature (640)..(640): n is a, c, g, or t
  misc_feature (646)..(646): n is a, c, g, or t
  misc_feature (651)..(651): n is a, c, g, or t
  misc_feature (653)..(653): n is a, c, g, or t
  misc_feature (655)..(655): n is a, c, g, or t
  misc_feature (667)..(667): n is a, c, g, or t
  misc_feature (674)..(674): n is a, c, g, or t
  misc_feature (676)..(677): n is a, c, g, or t
  misc_feature (680)..(680): n is a, c, g, or t
  misc_feature (683)..(683): n is a, c, g, or t
  misc_feature (691)..(691): n is a, c, g, or t
  misc_feature (695)..(695): n is a, c, g, or t
anantagagagaattaactatgagaggatcgcatcaccatcaccatcacggatcctatttaggtgacactatagtaatcgncgacccacgcgttccgggctcgcggacggtggncgacaggntgcgcccgcccgcgcccggggtgatgcagttgccccccgcgctgtgcgcccgcctcgctgcggggcccggggcggcgganccgctgcctgtanagcgggatcccgcggctggggccgcgccctttcgcttcgttgcgcgccccgtgcgcttcccgcggnagcaccagttcttcgaggatgggnacgtgcagcgccacctctacctccagnacntgatcatgcaagtggccgacgtgcctgaaaancccanggtgcccgcgtttgcctgccaagtggccggctgctgccaggtgttcgatgccctgnacgactangnagcaccactaccacacgctgcacggaaatgtttgctccttttgcaagngggccttcccttccggacacntgctggacnccnaaatcctganagtgncacaattcnantcttcnagatactgntctgatangcaggacatgtatcaantgcntgntaanaantgntgcacanaaaaattncaagancagcagaaacctnaaangatcanatggntnangatgcaaactgnaccccancnnaanttncccgtttnaatnaaacc

SEQ ID NO: 921 - DNA, 613 bp, Homo Sapiens
  misc_feature (3)..(3): n is a, c, g, or t
  misc_feature (74)..(74): n is a, c, g, or t
  misc_feature (108)..(108): n is a, c, g, or t
  misc_feature (358)..(358): n is a, c, g, or t
  misc_feature (475)..(475): n is a, c, g, or t
  misc_feature (478)..(478): n is a, c, g, or t
  misc_feature (515)..(515): n is a, c, g, or t
  misc_feature (522)..(522): n is a, c, g, or t
  misc_feature (531)..(531): n is a, c, g, or t
  misc_feature (557)..(557): n is a, c, g, or t
  misc_feature (581)..(581): n is a, c, g, or t
  misc_feature (588)..(588): n is a, c, g, or t
  misc_feature (591)..(591): n is a, c, g, or t
  misc_feature (595)..(595): n is a, c, g, or t
  misc_feature (599)..(599): n is a, c, g, or t
  misc_feature (604)..(604): n is a, c, g, or t
gantagagaaattaactatggagaggatcgcatcaccatcaccattcacggatcctatttaggtgacactatanaatcgtcgacccacgcgtccggcacggaagacanttcccgtcccagcacgccacgctgtcagccttcgccgcggtctatgtgtcgatgtacttcaactcggtcatctcggacaccaccaagctgctgaagcccatcctggtcttcgcctttgccatcgccgcgggcgtatgcgggctcacgcagatcacgcagtaccgcagccaccctgtggacgtgtatgccggcttcctcatcggggcgggcatcgctgcctacctggcctgccacgcggtgggcaacttcnaggccccacctgcagagaagcccgcggccccggcccccgccaaggacgcgctgcgggccctgacgcagcggggccacgactcggtttatcagcagaataagtcggtgagcaccgacnagntggggcccccagggcggctggagggcgcgccccggcncgtggcncgcgagaanacctcgctgggcagcctgaagcgcgncatcgtggacgtggacctgctggnccccgcncancccnatgnccaangaaaacatg

SEQ ID NO: 922 - DNA, 750 bp, Homo Sapiens
  misc_feature (3)..(3): n is a, c, g, or t
  misc_feature (8)..(8): n is a, c, g, or t
  misc_feature (18)..(18): n is a, c, g, or t
  misc_feature (28)..(28): n is a, c, g, or t
  misc_feature (32)..(32): n is a, c, g, or t
  misc_feature (34)..(34): n is a, c, g, or t
  misc_feature (55)..(55): n is a, c, g, or t
  misc_feature (59)..(59): n is a, c, g, or t
  misc_feature (76)..(76): n is a, c, g, or t
  misc_feature (81)..(81): n is a, c, g, or t
  misc_feature (83)..(83): n is a, c, g, or t
  misc_feature (96)..(97): n is a, c, g, or t
  misc_feature (108)..(110): n is a, c, g, or t
  misc_feature (140)..(141): n is a, c, g, or t
  misc_feature (155)..(156): n is a, c, g, or t
  misc_feature (161)..(161): n is a, c, g, or t
  misc_feature (174)..(174): n is a, c, g, or t
  misc_feature (179)..(179): n is a, c, g, or t
  misc_feature (190)..(190): n is a, c, g, or t
  misc_feature (204)..(204): n is a, c, g, or t
  misc_feature (206)..(206): n is a, c, g, or t
  misc_feature (213)..(213): n is a, c, g, or t
  misc_feature (215)..(215): n is a, c, g, or t
  misc_feature (225)..(225): n is a, c, g, or t
  misc_feature (228)..(228): n is a, c, g, or t
  misc_feature (234)..(234): n is a, c, g, or t
  misc_feature (236)..(236): n is a, c, g, or t
  misc_feature (241)..(241): n is a, c, g, or t
  misc_feature (243)..(244): n is a, c, g, or t
  misc_feature (250)..(250): n is a, c, g, or t
  misc_feature (252)..(252): n is a, c, g, or t
  misc_feature (255)..(255): n is a, c, g, or t
  misc_feature (261)..(261): n is a, c, g, or t
  misc_feature (264)..(264): n is a, c, g, or t
  misc_feature (274)..(274): n is a, c, g, or t
  misc_feature (283)..(283): n is a, c, g, or t
  misc_feature (285)..(285): n is a, c, g, or t
  misc_feature (296)..(296): n is a, c, g, or t
  misc_feature (310)..(311): n is a, c, g, or t
  misc_feature (323)..(323): n is a, c, g, or t
  misc_feature (331)..(331): n is a, c, g, or t
  misc_feature (334)..(334): n is a, c, g, or t
  misc_feature (350)..(350): n is a, c, g, or t
  misc_feature (355)..(355): n is a, c, g, or t
  misc_feature (359)..(359): n is a, c, g, or t
  misc_feature (364)..(364): n is a, c, g, or t
  misc_feature (366)..(366): n is a, c, g, or t
  misc_feature (369)..(369): n is a, c, g, or t
  misc_feature (371)..(373): n is a, c, g, or t
  misc_feature (378)..(378): n is a, c, g, or t
  misc_feature (385)..(385): n is a, c, g, or t
  misc_feature (407)..(407): n is a, c, g, or t
  misc_feature (411)..(411): n is a, c, g, or t
  misc_feature (418)..(418): n is a, c, g, or t
  misc_feature (425)..(426): n is a, c, g, or t
  misc_feature (433)..(433): n is a, c, g, or t
  misc_feature (443)..(443): n is a, c, g, or t
  misc_feature (477)..(477): n is a, c, g, or t
  misc_feature (480)..(480): n is a, c, g, or t
  misc_feature (491)..(491): n is a, c, g, or t
  misc_feature (499)..(499): n is a, c, g, or t
  misc_feature (503)..(503): n is a, c, g, or t
  misc_feature (536)..(536): n is a, c, g, or t
  misc_feature (538)..(539): n is a, c, g, or t
  misc_feature (544)..(544): n is a, c, g, or t
  misc_feature (548)..(548): n is a, c, g, or t
  misc_feature (585)..(585): n is a, c, g, or t
  misc_feature (587)..(587): n is a, c, g, or t
  misc_feature (591)..(591): n is a, c, g, or t
  misc_feature (598)..(598): n is a, c, g, or t
  misc_feature (605)..(605): n is a, c, g, or t
  misc_feature (616)..(616): n is a, c, g, or t
  misc_feature (619)..(619): n is a, c, g, or t
  misc_feature (621)..(621): n is a, c, g, or t
  misc_feature (624)..(624): n is a, c, g, or t
  misc_feature (631)..(631): n is a, c, g, or t
  misc_feature (637)..(640): n is a, c, g, or t
  misc_feature (646)..(647): n is a, c, g, or t
  misc_feature (655)..(655): n is a, c, g, or t
  misc_feature (660)..(660): n is a, c, g, or t
  misc_feature (662)..(662): n is a, c, g, or t
  misc_feature (668)..(668): n is a, c, g, or t
  misc_feature (670)..(670): n is a, c, g, or t
  misc_feature (675)..(675): n is a, c, g, or t
  misc_feature (688)..(688): n is a, c, g, or t
  misc_feature (692)..(692): n is a, c, g, or t
  misc_feature (711)..(711): n is a, c, g, or t
  misc_feature (713)..(713): n is a, c, g, or t
  misc_feature (715)..(715): n is a, c, g, or t
  misc_feature (718)..(718): n is a, c, g, or t
  misc_feature (720)..(720): n is a, c, g, or t
  misc_feature (732)..(732): n is a, c, g, or t
  misc_feature (734)..(736): n is a, c, g, or t
  misc_feature (741)..(741): n is a, c, g, or t
tanaaganagaaattaanttgggggggntggntngccttccccctccccggcttnggtnttttagttgagtgaaanatatngnatcctccaccctnncgtccgtcccnnncgctccgattgagggaaaagtttctttcannagctctcaatctcnntcggngtcgacggatccntactngggtgaaaagncctacaaatgtgangnatgtgcnanaaagcttctnccngagctnanatctnanncaacancntanaattcngantggagaaaanccctatcancngtgatgagtgnggccggtgtttctnncagagctcccancttattcntcntcagagaacccacacnggggngaanccctncnagngnnntgaangcggacnatgtttcagttgacagctctcnctcngaggccncccatgnnggtgcanaacaaacagnaagcctcgtgaaaacccggggcaaaaatatccangangaaaactcacnttaacctnttgnaaagctggtacaggaaggaagtctgtggttggncnnctttnaaantatagggctttttgacagcctttttgaagacctcttncnaaanaataaantgtactnaaatgacaggnatncnttnattaaanaataannnntgcttnnatagccancattngncttttntntaacngccattcttttgnttangtgacgaacaactattgtngnanttntnccgaattttatntnnngctgnaaagcaaaa

SEQ ID NO: 923 - DNA, 936 bp, Homo Sapiens; identical to SEQ ID NO: 129

SEQ ID NO: 924 - DNA, 600 bp, Homo Sapiens
  misc_feature (6)..(6): n is a, c, g, or t
  misc_feature (10)..(10): n is a, c, g, or t
  misc_feature (14)..(15): n is a, c, g, or t
  misc_feature (19)..(20): n is a, c, g, or t
  misc_feature (25)..(25): n is a, c, g, or t
  misc_feature (27)..(27): n is a, c, g, or t
  misc_feature (32)..(32): n is a, c, g, or t
  misc_feature (40)..(41): n is a, c, g, or t
  misc_feature (49)..(49): n is a, c, g, or t
  misc_feature (61)..(61): n is a, c, g, or t
  misc_feature (69)..(69): n is a, c, g, or t
  misc_feature (83)..(83): n is a, c, g, or t
  misc_feature (90)..(92): n is a, c, g, or t
  misc_feature (95)..(95): n is a, c, g, or t
  misc_feature (97)..(99): n is a, c, g, or t
  misc_feature (101)..(101): n is a, c, g, or t
  misc_feature (113)..(113): n is a, c, g, or t
  misc_feature (131)..(131): n is a, c, g, or t
  misc_feature (138)..(139): n is a, c, g, or t
  misc_feature (185)..(185): n is a, c, g, or t
  misc_feature (195)..(195): n is a, c, g, or t
  misc_feature (202)..(202): n is a, c, g, or t
  misc_feature (207)..(207): n is a, c, g, or t
  misc_feature (247)..(247): n is a, c, g, or t
  misc_feature (252)..(252): n is a, c, g, or t
  misc_feature (262)..(262): n is a, c, g, or t
  misc_feature (268)..(268): n is a, c, g, or t
  misc_feature (282)..(282): n is a, c, g, or t
  misc_feature (288)..(288): n is a, c, g, or t
  misc_feature (309)..(310): n is a, c, g, or t
  misc_feature (313)..(313): n is a, c, g, or t
  misc_feature (319)..(319): n is a, c, g, or t
  misc_feature (321)..(321): n is a, c, g, or t
  misc_feature (342)..(342): n is a, c, g, or t
  misc_feature (347)..(347): n is a, c, g, or t
  misc_feature (365)..(365): n is a, c, g, or t
  misc_feature (368)..(368): n is a, c, g, or t
  misc_feature (375)..(375): n is a, c, g, or t
  misc_feature (386)..(386): n is a, c, g, or t
  misc_feature (397)..(397): n is a, c, g, or t
  misc_feature (415)..(415): n is a, c, g, or t
  misc_feature (430)..(430): n is a, c, g, or t
  misc_feature (448)..(448): n is a, c, g, or t
  misc_feature (451)..(452): n is a, c, g, or t
  misc_feature (463)..(463): n is a, c, g, or t
  misc_feature (469)..(469): n is a, c, g, or t
  misc_feature (479)..(480): n is a, c, g, or t
  misc_feature (484)..(485): n is a, c, g, or t
  misc_feature (492)..(492): n is a, c, g, or t
  misc_feature (494)..(494): n is a, c, g, or t
  misc_feature (500)..(500): n is a, c, g, or t
  misc_feature (509)..(509): n is a, c, g, or t
  misc_feature (516)..(516): n is a, c, g, or t
  misc_feature (522)..(522): n is a, c, g, or t
  misc_feature (529)..(529): n is a, c, g, or t
  misc_feature (534)..(535): n is a, c, g, or t
  misc_feature (546)..(546): n is a, c, g, or t
  misc_feature (562)..(562): n is a, c, g, or t
  misc_feature (566)..(566): n is a, c, g, or t
  misc_feature (568)..(569): n is a, c, g, or t
  misc_feature (575)..(575): n is a, c, g, or t
  misc_feature (581)..(581): n is a, c, g, or t
  misc_feature (589)..(589): n is a, c, g, or t
  misc_feature (593)..(593): n is a, c, g, or t
  misc_feature (600)..(600): n is a, c, g, or t
aaaaanatanaagnnaaanntattntngtggngggggtcnncatctccntccaccatgtcnggtatatntattttatggaggncactatnnnaancnnncncacccccgacgntccgatggcgttgaatgncttcacnngaaagttctccgcgtcccagcacatgggttccctcggcttcctgcntcggaagcgnatcagcnggcancgtgggaaggtgaagagcttccctaaggatgacccatccnagccngtccacctcncagccntcctgggatacatngctggnatgactcacatcgtgcggganntcnacaggncnggatccaaggtgaacaagaangaggnggcggatgctgtgaccantgnacagacnccacccatggnggttgtgggcnttgtgggctacgaggaancccctcaaggcctcnggaccttcaagactgtcnttnntgatcacatcngtgatnaatgcaaganncgtnnctataananttggcntatatctangaataangccttnaccaagnactgnnagaaatggcangatgaggatggccaanaagnannttgganaagganttcatcancatnaagaaan

SEQ ID NO: 925 - DNA, 154 bp, Homo Sapiens; identical to SEQ ID NO: 160

SEQ ID NO: 926 - DNA, 895 bp, Homo Sapiens
  misc_feature (5)..(5): n is a, c, g, or t
  misc_feature (10)..(10): n is a, c, g, or t
  misc_feature (59)..(59): n is a, c, g, or t
  misc_feature (98)..(98): n is a, c, g, or t
  misc_feature (105)..(105): n is a, c, g, or t
  misc_feature (508)..(508): n is a, c, g, or t
  misc_feature (516)..(516): n is a, c, g, or t
  misc_feature (518)..(518): n is a, c, g, or t
  misc_feature (556)..(556): n is a, c, g, or t
  misc_feature (562)..(562): n is a, c, g, or t
  misc_feature (601)..(601): n is a, c, g, or t
  misc_feature (623)..(623): n is a, c, g, or t
  misc_feature (660)..(660): n is a, c, g, or t
  misc_feature (664)..(664): n is a, c, g, or t
  misc_feature (679)..(679): n is a, c, g, or t
  misc_feature (685)..(685): n is a, c, g, or t
  misc_feature (687)..(687): n is a, c, g, or t
  misc_feature (689)..(689): n is a, c, g, or t
  misc_feature (701)..(701): n is a, c, g, or t
  misc_feature (715)..(715): n is a, c, g, or t
  misc_feature (731)..(731): n is a, c, g, or t
  misc_feature (748)..(748): n is a, c, g, or t
  misc_feature (759)..(759): n is a, c, g, or t
  misc_feature (768)..(769): n is a, c, g, or t
  misc_feature (774)..(776): n is a, c, g, or t
  misc_feature (782)..(782): n is a, c, g, or t
  misc_feature (789)..(789): n is a, c, g, or t
  misc_feature (793)..(793): n is a, c, g, or t
  misc_feature (798)..(798): n is a, c, g, or t
  misc_feature (800)..(800): n is a, c, g, or t
  misc_feature (831)..(831): n is a, c, g, or t
  misc_feature (833)..(833): n is a, c, g, or t
  misc_feature (837)..(837): n is a, c, g, or t
  misc_feature (840)..(840): n is a, c, g, or t
  misc_feature (844)..(845): n is a, c, g, or t
  misc_feature (855)..(855): n is a, c, g, or t
  misc_feature (863)..(863): n is a, c, g, or t
  misc_feature (871)..(871): n is a, c, g, or t
  misc_feature (873)..(873): n is a, c, g, or t
  misc_feature (875)..(875): n is a, c, g, or t
  misc_feature (884)..(884): n is a, c, g, or t
  misc_feature (887)..(887): n is a, c, g, or t
  misc_feature (891)..(893): n is a, c, g, or t
aattngaggnaaattacttaggagagggatcgcatcaccatcaccatcacgggagtccntatttagggtgacacatatagaatcgtcgacccacgcgntccgggnaaagcctttttttggcccagctttattacgctatgcatgaaagaactcacactggagagaaaccatatgaatgtaagcagtgttctaaagccttccctgtttacagttcctatctaagacatgaaaaaatacacactggggagaaaccgtatgaatgtaagcagtgttctaaagccttccctgattacagttcatatctaagacatgaaagaactcacactggagagaaaccctacaaatgtaaacaatgtgggaaagccttcagtgtttccggttcccttcgagtacatgaaagaattcacactggagagaaaccctatacatgtaaacagtgtgggaaagcgttttgtcatcttggaagctttcaaagacacatgataatgcacagtggagatggacctcntaaatgtnanatatgtgggaaaggctttgattttcctggttcagcacnaattcntgaaggaactcacactctagagaaaccctatgaatgcangcaatgtgggaaagccttccgnacttccagttcccttcgaaaacatgaaacaacacacnctgnagagcaaccctatanatgaanangnggaacagctttnagtgacttattttncctttcaaagtcatgnaaaccacaaacagtgangagggaccctnaaagaatgnnccgcnnngtgggnaaagcanttanttccntntaaaaaacctttttgccccccatgcaaagancncccngcncaannaaaaacttangcgtgtcnaaacttgntngncaaagaccntcncccnnnca

SEQ ID NO: 927 - DNA, 902 bp, Homo Sapiens; identical to SEQ ID NO: 278

1. A method for the diagnosis of neurodegenerative diseases, comprising determining at least one marker sequence of a cDNA selected from the group SEQ 1-927 or respectively a protein coding therefor or respectively a partial sequence or fragment thereof on or from a patient to be examined.

2. The method of claim 1, wherein the neurodegenerative disease is Morbus Parkinson, and wherein said at least one marker sequence is a cDNA selected from the group SEQ 1-293 or respectively a protein coding therefor or respectively a partial sequence or fragment thereof.

3. The method of claim 1, wherein the neurodegenerative disease is Morbus Alzheimer, and wherein said at least one marker sequence is a cDNA selected from the group SEQ 294-664 or respectively a protein coding therefor or respectively a partial sequence or fragment thereof.

4. The method of claim 1 wherein said neurodegenerative disease is Morbus Huntington ('s Chorea) or Morbus Pick, and wherein said at least one marker sequence is of a cDNA selected from the group SEQ 665-927 or respectively a protein coding therefor or respectively a partial sequence or fragment thereof.

5. (canceled)

6. (canceled)

7. (canceled)

8. The method of claim 1, wherein said at least one marker sequence is applied onto a solid support, in particular a filter, a membrane, a magnetic or fluorophore-labeled bead, a silica wafer, glass, metal, ceramics, plastics, a chip, a target for mass spectrometry or a matrix.

9. (canceled)

10. A method for risk stratification or therapy control of a patient with neurodegenerative diseases, comprising determining at least one marker sequence of a cDNA selected from the group SEQ 1-927 or respectively a protein coding therefor or respectively a partial sequence or fragment thereof on or from a patient to be examined.

11. The method according to claim 10, wherein the stratification or the therapy control covers decisions for the treatment and therapy of the patient, the hospitalization of the patient, the use, effect and/or dosage of one or more drugs, a therapeutic measure or the monitoring of a course of the disease and the course of therapy, etiology or classification of a disease together with prognosis.

12. An arrangement of marker sequences containing at least one marker sequence of a cDNA selected from the group SEQ 1-927 or respectively a protein coding therefor of claim 18.

13. The arrangement according to claim 12, characterized in that at least 2 to 5 or 10 marker sequences are contained.

14. Arrangement according to claim 12, characterized in that the marker sequences are present as clones.

15. Assay, protein biochip comprising an arrangement according to claim 12, characterized in that the marker sequences are applied to a solid support.

16. (canceled)

17. (canceled)

18. A diagnostic agent for the diagnosis of neurodegenerative diseases respectively selected from the group SEQ 1-927 or respectively a protein coding therefor or respectively a partial sequence or fragment thereof.

19. (canceled)

20. A method of apheresis or blood lavage comprising using a marker sequence of a cDNA selected from the group SEQ 1-927 or respectively a protein coding therefor or respectively a partial sequence or fragment thereof of claim 18 as an affinity material for carrying out an apheresis or blood lavage for patients with neurodegenerative diseases.

21. A method for the identification and characterization of a substance for neurodegenerative diseases comprising contacting a test substance with an arrangement of claim 12, and detecting binding of said test substance.
